(19) United States
(12) Patent Application Publication
(10) Pub. No.: US 2022/0307036 A1
(43) Pub. Date: Sep. 29, 2022

(54) FUSION PROTEINS FOR IMPROVED ENZYME EXPRESSION

(71) Applicant: Novozymes A/S, Bagsvaerd (DK)

(72) Inventors: Monica Tassone, West Sacramento, CA (US); Judilee Osborn, West Sacramento, CA (US)

(73) Assignee: Novozymes A/S, Bagsvaerd (DK)

(21) Appl. No.: 17/615,807

(22) PCT Filed: Jul. 24, 2020
(86) PCT No.: PCT/US2020/043432

§ 371 Date: Dec. 1, 2021

Related U.S. Application Data
(60) Provisional application No. 62/883,519, filed on Aug. 6, 2019.

(51) Int. Cl. C12N 15/62; C12P 21/02; C12N 9/30; C12N 9/34; C12N 9/42; C12N 9/36; C12N 9/52; C12N 9/58; C12P 7/10

(52) U.S. Cl. CPC C12N 15/625; C12P 21/02; C12N 9/242; C12N 9/2428; C12N 9/2445; C12N 9/2462; C12N 9/52; C12N 9/58; C12P 7/10; C07K 2319/02

(57) ABSTRACT

Described herein are recombinant host organisms expressing a fusion protein with a foreign signal linked to the N-terminus of a mature polypeptide, such as an alpha-amylase, protease, beta-glucosidase or glucoamylase. Also described are processes for producing a fermentation product, such as ethanol, from starch or cellulosic-containing material with the recombinant host organisms.

### REFERENCE TO A SEQUENCE LISTING

[0001] This application contains a Sequence Listing in computer readable form, which is incorporated herein by reference.

### BACKGROUND

[0002] Production of ethanol from starch and cellulosic containing materials is well-known in the art.

[0003] The most commonly industrially used commercial process for starch-containing material, often referred to as a “conventional process”, includes liquefying gelatinized starch at high temperature (about 85° C.) using typically a bacterial alpha-amylase, followed by simultaneous saccharification and fermentation (SSF) carried out anaerobically in the presence of typically a glucoamylase and a Saccharomyces cerevisiae yeast.

[0004] Yeasts which are used for production of ethanol for use as fuel, such as in the corn ethanol industry, require several characteristics to ensure cost effective production of the ethanol. These characteristics include ethanol tolerance, low by-product yield, rapid fermentation, and the ability to limit the amount of residual sugars remaining in the ferment. Such characteristics have a marked effect on the viability of the industrial process.

[0005] Yeast of the genus Saccharomyces exhibits many of the characteristics required for production of ethanol. In particular, strains of Saccharomyces cerevisiae are widely used for the production of ethanol in the fuel ethanol industry. Strains of Saccharomyces cerevisiae that are widely used in the fuel ethanol industry have the ability to produce high yields of ethanol under fermentation conditions found in, for example, the fermentation of corn mash. An example of such a strain is the yeast used in commercially available ethanol yeast product called ETHANOL RED®.

[0006] Saccharomyces cerevisiae yeast have been genetically engineered to express alpha-amylase and/or glucoamylase to improve yield and decrease the amount of exogenously added enzymes necessary during SSF (e.g., WO2018/098381, WO2017/087330, WO2017/037614, WO2011/128712, WO2011/153516, US2018/0155744, WO2020/023411). Yeast have also been engineered to express trehalase in an attempt to increase fermentation yield by breaking down residual trehalose (e.g., WO2017/077504, WO2020/023411), and proteases to increase the amount of available amino nitrogen (e.g., WO2018/222990).

[0007] WO2018/027131 describes secretion of glucoamylases in yeast with certain leader-modified glucoamylase polypeptides. However, there remains a need for improved protein expression and secretion in genetically-engineered yeast for production of bioethanol in an economically and commercially relevant scale.

### SUMMARY

[0008] Described herein are, inter alia, methods for producing a fermentation product, such as ethanol, from starch or cellulosic-containing material, and yeast suitable for use in such processes. The Applicant has surprisingly found that certain non-native signal peptides linked to the 5′-end of a heterologous polypeptide, such as starch degrading enzyme, result in improved functional expression with enhanced secretion in yeast.

[0009] A first aspect relates to a recombinant host cell comprising a nucleic acid construct or expression vector encoding a fusion protein; wherein the fusion protein comprises a signal peptide described herein (e.g., a signal peptide comprising an amino acid sequence of any one of SEQ ID NOs: 244-339 or a variant thereof) linked to the N-terminus of a mature polypeptide; and wherein the signal peptide is foreign to the mature polypeptide.

[0010] In one embodiment, the signal peptide has an amino acid sequence with at least 60%, e.g., at least 65%, 70%, 75%, 80%, 85%, 90%, 95%, 97%, 98%, 99%, or 100% sequence identity, to the amino acid sequence of any one of SEQ ID NOs: 244-339. In one embodiment, the signal peptide differs by no more than ten amino acids, e.g., by no more than five amino acids, by no more than four amino acids, by no more than three amino acids, by no more than two amino acids, or by one amino acid from the amino acid sequence of any one of SEQ ID NOs: 244-339. In one embodiment, the signal peptide comprises or consists of the amino acid sequence of any one of SEQ ID NOs: 244-339.

[0011] In one embodiment, the signal peptide is directly linked to the N-terminus of a mature polypeptide without an intervening linker sequence.

[0012] In one embodiment, the mature polypeptide is an alpha-amylase, protease, beta-glucosidase or a glucoamylase. In one embodiment, the mature polypeptide is an alpha-amylase, and wherein the cell has higher alpha-amylase activity (e.g., using the method described in Example 2) when compared to an otherwise identical cell encoding the alpha-amylase without a signal peptide linked to the N-terminus under the same conditions. In one embodiment, the alpha-amylase has a mature polypeptide sequence of at least 60%, e.g., at least 65%, 70%, 75%, 80%, 85%, 90%, 95%, 97%, 98%, 99%, or 100% sequence identity to the amino acid sequence of any one of SEQ ID NOs: 76-101, 121-174 and 231. In one embodiment, the mature polypeptide is a glucoamylase, and wherein cell has higher glucoamylase activity (e.g., using the method described in Example 3) when compared to using an otherwise identical cell encoding the glucoamylase without a signal peptide linked to the N-terminus under the same conditions. In one embodiment, the glucoamylase has a mature polypeptide sequence with 60%, e.g., at least 65%, 70%, 75%, 80%, 85%, 90%, 95%, 97%, 98%, 99%, or 100% sequence identity, to the amino acid sequence of a Pycnoporus glucoamylase (e.g., a Pycnoporus sanguineus glucoamylase of SEQ ID NO: 229), a Gloeophyllum glucoamylase (e.g. a Gloeophyllum sepiarium of SEQ ID NO: 8), or a glucoamylase of any one of SEQ ID NOs: 102-113 (e.g., a Saccharomycopsis fibuligera glucoamylase of SEQ ID NO: 103 or 104, or a Trichoderma reesei glucoamylase of SEQ ID NO: 230). In one embodiment, the mature polypeptide is a protease, and wherein the cell has higher protease activity (e.g., using the method described in Example 5) when compared to an otherwise identical cell encoding the protease without a signal peptide linked to the N-terminus under the same conditions. In one embodiment, the protease has a mature polypeptide sequence of at least 60%, e.g., at least 65%, 70%, 75%, 80%, 85%, 90%, 95%, 97%, 98%, 99%, or 100% sequence identity to the amino acid sequence of any one of SEQ ID NOs: 9-73. In one embodiment, the mature polypeptide is an beta-glucosidase, and wherein the cell has higher beta-glucosidase activity (e.g., using the method described in Example 6) when compared to an otherwise identical cell encoding the beta-glucosidase without a signal peptide linked to the N-terminus under the same conditions. In one embodiment, the beta-glucosidase has a mature polypeptide sequence of at least 60%, e.g., at least 65%, 70%, 75%, 80%, 85%, 90%, 95%, 97%, 98%, 99%, or 100% sequence identity to the amino acid sequence of SEQ ID NO: 441.

[0013] In one embodiment, the recombinant host cell is a yeast cell. In one embodiment, the cell is a Saccharomyces, Rhodotorula, Schizosaccharomyces, Kluyveromyces, Pichia, Hansenula, Rhodosporidium, Candida, Yarrowia, Lipomyces, Cryptococcus, or Dekkera sp. yeast cell. In one embodiment, the cell is Saccharomyces cerevisiae.

[0014] In one embodiment, the recombinant host cell further comprises a heterologous polynucleotide encoding a phospholipase, trehalase, protease and/or pullulanase. In one embodiment, the heterologous polynucleotide is operably linked to a promoter that is foreign to the polynucleotide.

[0015] A second aspect relates to methods of producing a fermentation product from a starch-containing or cellulosic-containing material, the method comprising:

[0016] (a) saccharifying the starch-containing or cellulosic-containing material; and

[0017] (b) fermenting the saccharified material of step (a) with the recombinant host cell of the first aspect.

[0018] In one embodiment, the method comprises liquefying the starch-containing material at a temperature above the initial gelatinization temperature in the presence of an alpha-amylase and a protease prior to saccharification. In one embodiment, the fermentation product is ethanol.

[0019] A third aspect relates to methods of producing a derivative of host cell of the first aspect, comprising culturing a host cell of the first aspect with a second host cell under conditions which permit combining of DNA between the first and second host cells, and screening or selecting for a derived host cell.

[0020] A fourth aspect relates to compositions comprising the host cell of the first aspect with one or more naturally occurring and/or non-naturally occurring components, such as components selected from the group consisting of: surfactants, emulsifiers, gums, swelling agents, and antioxidants.

[0021] A fifth aspect relates to a nucleic acid construct or expression vector encoding a fusion protein, wherein the fusion protein comprises a signal peptide a described herein (e.g., a signal peptide comprising an amino acid sequence of any one of SEQ ID NOs: 244-339 or a variant thereof) linked to the N-terminus of a mature polypeptide; and wherein the signal peptide is foreign to the mature polypeptide.

[0022] In one embodiment, the signal peptide has an amino acid sequence with at least 60%, e.g., at least 65%, 70%, 75%, 80%, 85%, 90%, 95%, 97%, 98%, 99%, or 100% sequence identity, to the amino acid sequence of any one of SEQ ID NOs: 244-339. In one embodiment, the signal peptide differs by no more than ten amino acids, e.g., by no more than five amino acids, by no more than four amino acids, by no more than three amino acids, by no more than two amino acids, or by one amino acid from the amino acid sequence of any one of SEQ ID NOs: 244-339. In one embodiment, the signal peptide comprises or consists of the amino acid sequence of any one of SEQ ID NOs: 244-339.

[0023] In one embodiment, the signal peptide is directly linked to the N-terminus of a mature polypeptide without an intervening linker sequence.

[0024] In one embodiment, the mature polypeptide is an alpha-amylase, protease, beta-glucosidase or glucoamylase. In one embodiment, the alpha-amylase has a mature polypeptide sequence of at least 60%, e.g., at least 65%, 70%, 75%, 80%, 85%, 90%, 95%, 97%, 98%, 99%, or 100% sequence identity to the amino acid sequence of any one of SEQ ID NOs: 76-101, 121-174 and 231. In one embodiment, the glucoamylase has a mature polypeptide sequence with 60%, e.g., at least 65%, 70%, 75%, 80%, 85%, 90%, 95%, 97%, 98%, 99%, or 100% sequence identity, to the amino acid sequence of a Pycnoporus glucoamylase (e.g., a Pycnoporus sanguineus glucoamylase of SEQ ID NO: 229), a Gloeophyllum glucoamylase (e.g. a Gloeophyllum sepiarium of SEQ ID NO: 8), or a glucoamylase of any one of SEQ ID NOs: 102-113 (e.g., a Saccharomycopsis fibuligera glucoamylase of SEQ ID NO: 103 or 104, or a Trichoderma reesei glucoamylase of SEQ ID NO: 230). In one embodiment, the protease has a mature polypeptide sequence of at least 60%, e.g., at least 65%, 70%, 75%, 80%, 85%, 90%, 95%, 97%, 98%, 99%, or 100% sequence identity to the amino acid sequence of any one of SEQ ID NOs: 9-73. In one embodiment, the beta-glucosidase has a mature polypeptide sequence of at least 60%, e.g., at least 65%, 70%, 75%, 80%, 85%, 90%, 95%, 97%, 98%, 99%, or 100% sequence identity to the amino acid sequence of SEQ ID NO: 441.

### DEFINITIONS

[0025] Unless defined otherwise or clearly indicated by context, all technical and scientific terms used herein have the same meaning as commonly understood by one of ordinary skill in the art.

[0026] Allelic variant: The term “allelic variant” means any of two or more alternative forms of a gene occupying the same chromosomal locus. Allelic variation arises naturally through mutation, and may result in polymorphism within populations. Gene mutations can be silent (no change in the encoded polypeptide) or may encode polypeptides having altered amino acid sequences. An allelic variant of a polypeptide is a polypeptide encoded by an allelic variant of a gene.

[0027] Alpha-amylase: The term “alpha-amylase” means an 1,4-alpha-D-glucan glucanohydrolase, EC. 3.2.1.1, which catalyze hydrolysis of starch and other linear and branched 1,4-glucosidic oligo- and polysaccharides. For purposes of the present invention, alpha amylase activity can be determined using an alpha-amylase assay described in the examples section below.

[0028] Auxiliary Activity 9: The term “Auxiliary Activity 9” or “AA9” means a polypeptide classified as a lytic polysaccharide monooxygenase (Quinlan et al., 2011, Proc. Natl. Acad. Sci. USA 208: 15079-15084; Phillips et al., 2011, ACS Chem. Biol. 6: 1399-1406; Lin et al., 2012, Structure 20: 1051-1061). AA9 polypeptides were formerly classified into the glycoside hydrolase Family 61 (GH61) according to Henrissat, 1991, Biochem. J. 280: 309-316, and Henrissat and Bairoch, 1996, Biochem. J. 316: 695-696.

[0029] AA9 polypeptides enhance the hydrolysis of a cellulosic-containing material by an enzyme having cellulolytic activity. Cellulolytic enhancing activity can be determined by measuring the increase in reducing sugars or the increase of the total of cellobiose and glucose from the hydrolysis of a cellulosic-containing material by cellulolytic enzyme under the following conditions: 1-50 mg of total protein/g of cellulose in pretreated corn stover (PCS), wherein total protein is comprised of 50-99.5% w/w cellulolytic enzyme protein and 0.5-50% w/w protein of an AA9 polypeptide for 1-7 days at a suitable temperature, such as 40 C-80° C., e.g., 50° C., 55° C., 60° C., 65° C., or 70° C., and a suitable pH, such as 4-9, e.g., 4.5, 5.0, 5.5, 6.0, 6.5, 7.0, 7.5, 8.0, or 8.5, compared to a control hydrolysis with equal total protein loading without cellulolytic enhancing activity (1-50 mg of cellulolytic protein/g of cellulose in PCS).

[0030] AA9 polypeptide enhancing activity can be determined using a mixture of CELLUCLAST® 1.5L (Novozymes A/S, Bagsværd, Denmark) and beta-glucosidase as the source of the cellulolytic activity, wherein the beta-glucosidase is present at a weight of at least 2-5% protein of the cellulase protein loading. In one embodiment, the beta-glucosidase is an Aspergillus oryzae beta-glucosidase (e.g., recombinantly produced in Aspergillus oryzae according to WO02/095014). In another embodiment, the beta-glucosidase is an Aspergillus fumigatus beta-glucosidase (e.g., recombinantly produced in Aspergillus oryzae as described in WO02/095014).

[0031] AA9 polypeptide enhancing activity can also be determined by incubating an AA9 polypeptide with 0.5% phosphoric acid swollen cellulose (PASO), 100 mM sodium acetate pH 5, 1 mM MnSO₄, 0.1% gallic acid, 0.025 mg/ml of Aspergillus fumigatus beta-glucosidase, and 0.01% TRITON® X-100 (4-(1,1,3,3-tetramethylbutyl)phenyl-polyethylene glycol) for 24-96 hours at 40° C. followed by determination of the glucose released from the PASC.

[0032] AA9 polypeptide enhancing activity can also be determined according to WO2013/028928 for high temperature compositions.

[0033] AA9 polypeptides enhance the hydrolysis of a cellulosic-containing material catalyzed by enzyme having cellulolytic activity by reducing the amount of cellulolytic enzyme required to reach the same degree of hydrolysis preferably at least 1.01-fold, e.g., at least 1.05-fold, at least 1.10-fold, at least 1.25-fold, at least 1.5-fold, at least 2-fold, at least 3-fold, at least 4-fold, at least 5-fold, at least 10-fold, or at least 20-fold.

[0034] Beta-glucosidase: The term “beta-glucosidase” means a beta-D-glucoside glucohydrolase (E.C. 3.2.1.21) that catalyzes the hydrolysis of terminal non-reducing beta-D-glucose residues with the release of beta-D-glucose. Beta-glucosidase activity can be determined using p-nitrophenyl-beta-D-glucopyranoside as substrate according to the procedure of Venturi et al., 2002, J. Basic Microbiol. 42: 55-66. One unit of beta-glucosidase is defined as 1.0 μmole of p-nitrophenolate anion produced per minute at 25° C., pH 4.8 from 1 mM p-nitrophenyl-beta-D-glucopyranoside as substrate in 50 mM sodium citrate containing 0.01% TWEEN® 20. For purposes of the present invention, beta-glucosidase activity can be determined using a beta-glucosidase assay described in the examples section below.

[0035] Beta-xylosidase: The term “beta-xylosidase” means a beta-D-xyloside xylohydrolase (E.C. 3.2.1.37) that catalyzes the exo-hydrolysis of short beta (1→4)-xylooligosaccharides to remove successive D-xylose residues from non-reducing termini. Beta-xylosidase activity can be determined using 1 mM p-nitrophenyl-beta-D-xyloside as substrate in 100 mM sodium citrate containing 0.01% TWEEN® 20 at pH 5, 40° C. One unit of beta-xylosidase is defined as 1.0 μmole of p-nitrophenolate anion produced per minute at 40° C., pH 5 from 1 mM p-nitrophenyl-beta-D-xyloside in 100 mM sodium citrate containing 0.01% TWEEN® 20.

[0036] Catalase: The term “catalase” means a hydrogen-peroxide:hydrogen-peroxide oxidoreductase (EC 1.11.1.6) that catalyzes the conversion of 2 H₂O₂ to O₂+2H₂O. For purposes of the present invention, catalase activity is determined according to U.S. Pat. No. 5,646,025. One unit of catalase activity equals the amount of enzyme that catalyzes the oxidation of 1 μmole of hydrogen peroxide under the assay conditions.

[0037] Catalytic domain: The term “catalytic domain” means the region of an enzyme containing the catalytic machinery of the enzyme.

[0038] Cellobiohydrolase: The term “cellobiohydrolase” means a 1,4-beta-D-glucan cellobiohydrolase (E.C. 3.2.1.91 and E.C. 3.2.1.176) that catalyzes the hydrolysis of 1,4-beta-D-glucosidic linkages in cellulose, cellooligosaccharides, or any beta-1,4-linked glucose containing polymer, releasing cellobiose from the reducing end (cellobiohydrolase I) or non-reducing end (cellobiohydrolase II) of the chain (Teeri, 1997, Trends in Biotechnology 15: 160-167; Teeri et al., 1998, Biochem. Soc. Trans. 26: 173-178). Cellobiohydrolase activity can be determined according to the procedures described by Lever et al., 1972, Anal. Biochem. 47: 273-279; van Tilbeurgh et al., 1982, FEBS Letters 149: 152-156; van Tilbeurgh and Claeyssens, 1985, FEBS Letters 187: 283-288; and Tomme et al., 1988, Eur. J. Biochem. 170: 575-581.

[0039] Cellulolytic enzyme or cellulase: The term “cellulolytic enzyme” or “cellulase” means one or more (e.g., several) enzymes that hydrolyze a cellulosic-containing material. Such enzymes include endoglucanase(s), cellobiohydrolase(s), beta-glucosidase(s), or combinations thereof. The two basic approaches for measuring cellulolytic enzyme activity include: (1) measuring the total cellulolytic enzyme activity, and (2) measuring the individual cellulolytic enzyme activities (endoglucanases, cellobiohydrolases, and beta-glucosidases) as reviewed in Zhang et al., 2006, Biotechnology Advances 24: 452-481. Total cellulolytic enzyme activity can be measured using insoluble substrates, including Whatman No1 filter paper, microcrystalline cellulose, bacterial cellulose, algal cellulose, cotton, pretreated lignocellulose, etc. The most common total cellulolytic activity assay is the filter paper assay using Whatman No1 filter paper as the substrate. The assay was established by the International Union of Pure and Applied Chemistry (IUPAC) (Ghose, 1987, Pure Appl. Chem. 59: 257-68).

[0040] Cellulolytic enzyme activity can be determined by measuring the increase in production/release of sugars during hydrolysis of a cellulosic-containing material by cellulolytic enzyme(s) under the following conditions: 1-50 mg of cellulolytic enzyme protein/g of cellulose in pretreated corn stover (PCS) (or other pretreated cellulosic-containing material) for 3-7 days at a suitable temperature such as 40° C.-80° C., e.g., 50° C., 55° C., 60° C., 65° C., or 70° C., and a suitable pH such as 4-9, e.g., 5.0, 5.5, 6.0, 6.5, or 7.0, compared to a control hydrolysis without addition of cellulolytic enzyme protein. Typical conditions are 1 ml reactions, washed or unwashed PCS, 5% insoluble solids (dry weight), 50 mM sodium acetate pH 5, 1 mM MnSO₄, 50° C., 55° C., or 60° C., 72 hours, sugar analysis by AMINEX® HPX-87H column chromatography (Bio-Rad Laboratories, Inc., Hercules, Calif., USA).

[0041] Coding sequence: The term “coding sequence” or “coding region” means a polynucleotide sequence, which specifies the amino acid sequence of a polypeptide. The boundaries of the coding sequence are generally determined by an open reading frame, which usually begins with the ATG start codon or alternative start codons such as GTG and TTG and ends with a stop codon such as TAA, TAG, and TGA. The coding sequence may be a sequence of genomic DNA, cDNA, a synthetic polynucleotide, and/or a recombinant polynucleotide.

[0042] Control sequence: The term “control sequence” means a nucleic acid sequence necessary for polypeptide expression. Control sequences may be native or foreign to the polynucleotide encoding the polypeptide, and native or foreign to each other. Such control sequences include, but are not limited to, a leader sequence, polyadenylation sequence, propeptide sequence, promoter sequence, signal peptide sequence, and transcription terminator sequence. The control sequences may be provided with linkers for the purpose of introducing specific restriction sites facilitating ligation of the control sequences with the coding region of the polynucleotide encoding a polypeptide.

[0043] Disruption: The term “disruption” means that a coding region and/or control sequence of a referenced gene is partially or entirely modified (such as by deletion, insertion, and/or substitution of one or more nucleotides) resulting in the absence (inactivation) or decrease in expression, and/or the absence or decrease of enzyme activity of the encoded polypeptide. The effects of disruption can be measured using techniques known in the art such as detecting the absence or decrease of enzyme activity using from cell-free extract measurements referenced herein; or by the absence or decrease of corresponding mRNA (e.g., at least 25% decrease, at least 50% decrease, at least 60% decrease, at least 70% decrease, at least 80% decrease, or at least 90% decrease); the absence or decrease in the amount of corresponding polypeptide having enzyme activity (e.g., at least 25% decrease, at least 50% decrease, at least 60% decrease, at least 70% decrease, at least 80% decrease, or at least 90% decrease); or the absence or decrease of the specific activity of the corresponding polypeptide having enzyme activity (e.g., at least 25% decrease, at least 50% decrease, at least 60% decrease, at least 70% decrease, at least 80% decrease, or at least 90% decrease). Disruptions of a particular gene of interest can be generated by methods known in the art, e.g., by directed homologous recombination (see Methods in Yeast Genetics (1997 edition), Adams, Gottschling, Kaiser, and Stems, Cold Spring Harbor Press (1998)).

[0044] Endogenous gene: The term “endogenous gene” means a gene that is native to the referenced host cell. “Endogenous gene expression” means expression of an endogenous gene.

[0045] Endoglucanase: The term “endoglucanase” means a 4-(1,3;1,4)-beta-D-glucan 4-glucanohydrolase (E.C. 3.2.1.4) that catalyzes endohydrolysis of 1,4-beta-D-glycosidic linkages in cellulose, cellulose derivatives (such as carboxymethyl cellulose and hydroxyethyl cellulose), lichenin, beta-1,4 bonds in mixed beta-1,3-1,4 glucans such as cereal beta-D-glucans or xyloglucans, and other plant material containing cellulosic components. Endoglucanase activity can be determined by measuring reduction in substrate viscosity or increase in reducing ends determined by a reducing sugar assay (Zhang et al., 2006, Biotechnology Advances 24: 452-481). Endoglucanase activity can also be determined using carboxymethyl cellulose (CMC) as substrate according to the procedure of Ghose, 1987, Pure and Appl. Chem. 59: 257-268, at pH 5, 40° C.

[0046] Expression: The term “expression” includes any step involved in the production of the polypeptide including, but not limited to, transcription, post-transcriptional modification, translation, post-translational modification, and secretion. Expression can be measured—for example, to detect increased expression—by techniques known in the art, such as measuring levels of mRNA and/or translated polypeptide.

[0047] Expression vector: The term “expression vector” means a linear or circular DNA molecule that comprises a polynucleotide encoding a polypeptide and is operably linked to control sequences that provide for its expression.

[0048] Fermentable medium: The term “fermentable medium” or “fermentation medium” refers to a medium comprising one or more (e.g., two, several) sugars, such as glucose, fructose, sucrose, cellobiose, xylose, xylulose, arabinose, mannose, galactose, and/or soluble oligosaccharides, wherein the medium is capable, in part, of being converted (fermented) by a host cell into a desired product, such as ethanol. In some instances, the fermentation medium is derived from a natural source, such as sugar cane, starch, or cellulose, and may be the result of pretreating the source by enzymatic hydrolysis (saccharification). The term fermentation medium is understood herein to refer to a medium before the fermenting organism is added, such as, a medium resulting from a saccharification process, as well as a medium used in a simultaneous saccharification and fermentation process (SSF).

[0049] Glucoamylase: The term “glucoamylase” (1,4-alpha-D-glucan glucohydrolase, EC 3.2.1.3) is defined as an enzyme that catalyzes the release of D-glucose from the non-reducing ends of starch or related oligo- and polysaccharide molecules. For purposes of the present invention, glucoamylase activity can be determined using a glucoamylase assay described in the examples section below.

[0050] Hemicellulolytic enzyme or hemicellulase: The term “hemicellulolytic enzyme” or “hemicellulase” means one or more (e.g., several) enzymes that hydrolyze a hemicellulosic material. See, for example, Shallom and Shoham, 2003, Current Opinion In Microbiology 6(3): 219-228). Hemicellulases are key components in the degradation of plant biomass. Examples of hemicellulases include, but are not limited to, an acetylmannan esterase, an acetylxylan esterase, an arabinanase, an arabinofuranosidase, a coumaric acid esterase, a feruloyl esterase, a galactosidase, a glucuronidase, a glucuronoyl esterase, a mannanase, a mannosidase, a xylanase, and a xylosidase. The substrates for these enzymes, hemicelluloses, are a heterogeneous group of branched and linear polysaccharides that are bound via hydrogen bonds to the cellulose microfibrils in the plant cell wall, crosslinking them into a robust network. Hemicelluloses are also covalently attached to lignin, forming together with cellulose a highly complex structure. The variable structure and organization of hemicelluloses require the concerted action of many enzymes for its complete degradation. The catalytic modules of hemicellulases are either glycoside hydrolases (GHs) that hydrolyze glycosidic bonds, or carbohydrate esterases (CEs), which hydrolyze ester linkages of acetate or ferulic acid side groups. These catalytic modules, based on homology of their primary sequence, can be assigned into GH and CE families. Some families, with an overall similar fold, can be further grouped into clans, marked alphabetically (e.g., GH-A). A most informative and updated classification of these and other carbohydrate active enzymes is available in the Carbohydrate-Active Enzymes (CAZy) database. Hemicellulolytic enzyme activities can be measured according to Ghose and Bisaria, 1987, Pure & Appl. Chem. 59: 1739-1752, at a suitable temperature such as 40° C.-80° C., e.g., 50° C., 55° C., 60° C., 65° C., or 70° C., and a suitable pH such as 4-9, e.g., 5.0, 5.5, 6.0, 6.5, or 7.0.

[0051] Heterologous polynucleotide: The term “heterologous polynucleotide” is defined herein as a polynucleotide that is not native to the host cell; a native polynucleotide in which structural modifications have been made to the coding region; a native polynucleotide whose expression is quantitatively altered as a result of a manipulation of the DNA by recombinant DNA techniques, e.g., a different (foreign) promoter; or a native polynucleotide in a host cell having one or more extra copies of the polynucleotide to quantitatively alter expression. A “heterologous gene” is a gene comprising a heterologous polynucleotide.

[0052] High stringency conditions: The term “high stringency conditions” means for probes of at least 100 nucleotides in length, prehybridization and hybridization at 42° C. in 5×SSPE, 0.3% SDS, 200 micrograms/ml sheared and denatured salmon sperm DNA, and 50% formamide, following standard Southern blotting procedures for 12 to 24 hours. The carrier material is finally washed three times each for 15 minutes using 0.2×SSC, 0.2% SDS at 65° C.

[0053] Host cell: The term “host cell” means any cell type that is susceptible to transformation, transfection, transduction, and the like with a nucleic acid construct or expression vector comprising a polynucleotide described herein. The term “host cell” encompasses any progeny of a parent cell that is not identical to the parent cell due to mutations that occur during replication. The term “recombinant cell” is defined herein as a non-naturally occurring host cell comprising one or more (e.g., two, several) heterologous polynucleotides.

[0054] Low stringency conditions: The term “low stringency conditions” means for probes of at least 100 nucleotides in length, prehybridization and hybridization at 42° C. in 5×SSPE, 0.3% SDS, 200 micrograms/ml sheared and denatured salmon sperm DNA, and 25% formamide, following standard Southern blotting procedures for 12 to 24 hours. The carrier material is finally washed three times each for 15 minutes using 0.2×SSC, 0.2% SDS at 50° C.

[0055] Mature polypeptide: The term “mature polypeptide” is defined herein as a polypeptide having biological activity that is in its final form following translation and any post-translational modifications, such as N-terminal processing, C-terminal truncation, glycosylation, phosphorylation, etc. The mature polypeptide sequence lacks a signal sequence, which may be determined using techniques known in the art (See, e.g., Zhang and Henzel, 2004, Protein Science 13: 2819-2824). The term “mature polypeptide coding sequence” means a polynucleotide that encodes a mature polypeptide.

[0056] Medium stringency conditions: The term “medium stringency conditions” means for probes of at least 100 nucleotides in length, prehybridization and hybridization at 42° C. in 5×SSPE, 0.3% SDS, 200 micrograms/ml sheared and denatured salmon sperm DNA, and 35% formamide, following standard Southern blotting procedures for 12 to 24 hours. The carrier material is finally washed three times each for 15 minutes using 0.2×SSC, 0.2% SDS at 55° C.

[0057] Medium-high stringency conditions: The term “medium-high stringency conditions” means for probes of at least 100 nucleotides in length, prehybridization and hybridization at 42° C. in 5×SSPE, 0.3% SDS, 200 micrograms/ml sheared and denatured salmon sperm DNA, and 35% formamide, following standard Southern blotting procedures for 12 to 24 hours. The carrier material is finally washed three times each for 15 minutes using 0.2×SSC, 0.2% SDS at 60° C.

[0058] Nucleic acid construct: The term “nucleic acid construct” means a polynucleotide comprises one or more (e.g., two, several) control sequences. The polynucleotide may be single-stranded or double-stranded, and may be isolated from a naturally occurring gene, modified to contain segments of nucleic acids in a manner that would not otherwise exist in nature, or synthetic.

[0059] Operably linked: The term “operably linked” means a configuration in which a control sequence is placed at an appropriate position relative to the coding sequence of a polynucleotide such that the control sequence directs expression of the coding sequence.

[0060] Phospholipase: The term “phospholipase” means an enzyme that catalyzes the conversion of phospholipids into fatty acids and other lipophilic substances, such as phospholipase A (EC numbers 3.1.1.4, 3.1.1.5 and 3.1.1.32) or phospholipase C (EC numbers 3.1.4.3 and 3.1.4.11). Phospholipase activity may be determined using activity assays known in the art.

[0061] Pretreated corn stover: The term “Pretreated Corn Stover” or “PCS” means a cellulosic-containing material derived from corn stover by treatment with heat and dilute sulfuric acid, alkaline pretreatment, neutral pretreatment, or any pretreatment known in the art.

[0062] Protease: The term “protease” is defined herein as an enzyme that hydrolyses peptide bonds. It includes any enzyme belonging to the EC 3.4 enzyme group (including each of the thirteen subclasses thereof). The EC number refers to Enzyme Nomenclature 1992 from NC-IUBMB, Academic Press, San Diego, Calif., including supplements 1-5 published in Eur. J. Biochem. 223: 1-5 (1994); Eur. J. Biochem. 232: 1-6 (1995); Eur. J. Biochem. 237: 1-5 (1996); Eur. J. Biochem. 250: 1-6 (1997); and Eur. J. Biochem. 264: 610-650 (1999); respectively. The term “subtilases” refer to a sub-group of serine protease according to Siezen et al., 1991, Protein Engng. 4: 719-737 and Siezen et al., 1997, Protein Science 6: 501-523. Serine proteases or serine peptidases is a subgroup of proteases characterised by having a serine in the active site, which forms a covalent adduct with the substrate. Further the subtilases (and the serine proteases) are characterised by having two active site amino acid residues apart from the serine, namely a histidine and an aspartic acid residue. The subtilases may be divided into 6 sub-divisions, i.e. the Subtilisin family, the Thermitase family, the Proteinase K family, the Lantibiotic peptidase family, the Kexin family and the Pyrolysin family. The term “protease activity” means a proteolytic activity (EC 3.4). Protease activity may be determined using methods described in the art (e.g., US 2015/0125925) or using commercially available assay kits (e.g., Sigma-Aldrich). For purposes of the present invention, protease activity can be determined using a protease assay described in the examples section below.

[0063] Pullulanase: The term “pullulanase” means a starch debranching enzyme having pullulan 6-glucano-hydrolase activity (EC 3.2.1.41) that catalyzes the hydrolysis the α-1,6-glycosidic bonds in pullulan, releasing maltotriose with reducing carbohydrate ends. For purposes of the present invention, pullulanase activity can be determined according to a PHADEBAS assay or the sweet potato starch assay described in WO2016/087237.

[0064] Sequence Identity: The relatedness between two amino acid sequences or between two nucleotide sequences is described by the parameter “sequence identity”.

[0065] For purposes described herein, the degree of sequence identity between two amino acid sequences is determined using the Needleman-Wunsch algorithm (Needleman and Wunsch, J. Mol. Biol. 1970, 48, 443-453) as implemented in the Needle program of the EMBOSS package (EMBOSS: The European Molecular Biology Open Software Suite, Rice et al., Trends Genet 2000, 16, 276-277), preferably version 3.0.0 or later. The optional parameters used are gap open penalty of 10, gap extension penalty of 0.5, and the EBLOSUM62 (EMBOSS version of BLOSUM62) substitution matrix. The output of Needle labeled “longest identity” (obtained using the —nobrief option) is used as the percent identity and is calculated as follows:

(Identical Residues×100)/(Length of the Referenced Sequence−Total Number of Gaps in Alignment)

[0066] For purposes described herein, the degree of sequence identity between two deoxyribonucleotide sequences is determined using the Needleman-Wunsch algorithm (Needleman and Wunsch, 1970, supra) as implemented in the Needle program of the EMBOSS package (EMBOSS: The European Molecular Biology Open Software Suite, Rice et al., 2000, supra), preferably version 3.0.0 or later. The optional parameters used are gap open penalty of 10, gap extension penalty of 0.5, and the EDNAFULL (EMBOSS version of NCBI NUC4.4) substitution matrix. The output of Needle labeled “longest identity” (obtained using the —nobrief option) is used as the percent identity and is calculated as follows:

(Identical Deoxyribonucleotides×100)/(Length of Referenced Sequence−Total Number of Gaps in Alignment)

[0067] Signal peptide: The term “signal peptide” is defined herein as a peptide linked (fused) in frame to the amino terminus of a polypeptide having biological activity and directs the polypeptide into the cell's secretory pathway. Signal sequences may be determined using techniques known in the art (See, e.g., Zhang and Henzel, 2004, Protein Science 13: 2819-2824). The polypeptides described herein may comprise any suitable signal peptide known in the art, or any signal peptide described herein (e.g., any of SEQ ID NOs: 244-339 or a variant thereof).

[0068] Trehalase: The term “trehalase” means an enzyme which degrades trehalose into its unit monosaccharides (i.e., glucose). Trehalases are classified in EC 3.2.1.28 (alpha,alpha-trehalase) and EC. 3.2.1.93 (alpha,alpha-phosphotrehalase). The EC classes are based on recommendations of the Nomenclature Committee of the International Union of Biochemistry and Molecular Biology (IUBMB). Description of EC classes can be found on the internet, e.g., on “http://www.expasy.orq/enzyme/”. Trehalases are enzymes that catalyze the following reactions:

[0069] EC 3.2.1.28: Alpha,alpha-trehalose+H₂O⇔2D-glucose;

[0070] EC 3.2.1. 93: Alpha,alpha-trehalose 6-phosphate+H₂O⇔D-glucose+D-glucose 6-phosphate.

[0071] Trehalase activity may be determined according to procedures known in the art.

[0072] Very high stringency conditions: The term “very high stringency conditions” means for probes of at least 100 nucleotides in length, prehybridization and hybridization at 42° C. in 5×SSPE, 0.3% SDS, 200 micrograms/ml sheared and denatured salmon sperm DNA, and 50% formamide, following standard Southern blotting procedures for 12 to 24 hours. The carrier material is finally washed three times each for 15 minutes using 0.2×SSC, 0.2% SDS at 70° C.

[0073] Very low stringency conditions: The term “very low stringency conditions” means for probes of at least 100 nucleotides in length, prehybridization and hybridization at 42° C. in 5×SSPE, 0.3% SDS, 200 micrograms/ml sheared and denatured salmon sperm DNA, and 25% formamide, following standard Southern blotting procedures for 12 to 24 hours. The carrier material is finally washed three times each for 15 minutes using 0.2×SSC, 0.2% SDS at 45° C.

[0074] Xylanase: The term “xylanase” means a 1,4-beta-D-xylan-xylohydrolase (E.C. 3.2.1.8) that catalyzes the endohydrolysis of 1,4-beta-D-xylosidic linkages in xylans. Xylanase activity can be determined with 0.2% AZCL-arabinoxylan as substrate in 0.01% TRITON® X-100 and 200 mM sodium phosphate pH 6 at 37° C. One unit of xylanase activity is defined as 1.0 μmole of azurine produced per minute at 37° C., pH 6 from 0.2% AZCL-arabinoxylan as substrate in 200 mM sodium phosphate pH 6.

[0075] Xylose Isomerase: The term “Xylose Isomerase” or “XI” means an enzyme which can catalyze D-xylose into D-xylulose in vivo, and convert D-glucose into D-fructose in vitro. Xylose isomerase is also known as “glucose isomerase” and is classified as E.C. 5.3.1.5. As the structure of the enzyme is very stable, the xylose isomerase is a good model for studying the relationships between protein structure and functions (Karimaki et al., Protein Eng Des Sel, 12004, 17 (12):861-869). Xylose Isomerase activity may be determined using techniques known in the art (e.g., a coupled enzyme assay using D-sorbitol dehygrogenase, as described by Verhoeven et. al., 2017, Sci Rep 7, 46155).

[0076] Reference to “about” a value or parameter herein includes embodiments that are directed to that value or parameter per se. For example, description referring to “about X” includes the embodiment “X”. When used in combination with measured values, “about” includes a range that encompasses at least the uncertainty associated with the method of measuring the particular value, and can include a range of plus or minus two standard deviations around the stated value.

[0077] Likewise, reference to a gene or polypeptide that is “derived from” another gene or polypeptide X, includes the gene or polypeptide X.

[0078] As used herein and in the appended claims, the singular forms “a,” “or,” and “the” include plural referents unless the context clearly dictates otherwise.

[0079] It is understood that the embodiments described herein include “consisting” and/or “consisting essentially of” embodiments. As used herein, except where the context requires otherwise due to express language or necessary implication, the word “comprise” or variations such as “comprises” or “comprising” is used in an inclusive sense, i.e. to specify the presence of the stated features but not to preclude the presence or addition of further features in various embodiments.

### DETAILED DESCRIPTION

[0080] Described herein, inter alia, are methods for producing a fermentation product, such as ethanol, from starch or cellulosic containing material.

[0081] During industrial scale fermentation, yeast encounter various physiological challenges including variable concentrations of sugars, high concentrations of yeast metabolites such as ethanol, glycerol, organic acids, osmotic stress, as well as potential competition from contaminating microbes such as wild yeasts and bacteria. Accordingly, it remains unclear how modified yeast will perform during fermentation. In particular, the functional expression of heterologous enzymes by an industrially-relevant Saccharomyces cerevisiae yeast is uncertain (See, for example U.S. Pat. No. 9,206,444 where the applicant was unable to functionally express numerous enzymes/enzyme classes).

[0082] The Applicant has surprisingly found that certain non-native signal peptides linked to the 5′-end of a heterologous polypeptide result in improved functional expression with enhanced secretion in yeast.

[0083] Accordingly, in one aspect is method of producing a fermentation product from a starch-containing or cellulosic-containing material, the method comprising:

[0084] (a) saccharifying the starch-containing or cellulosic-containing material; and

[0085] (b) fermenting the saccharified material of step (a) with a fermenting organism;

[0086] wherein the fermenting organism comprises a nucleic acid construct encoding a fusion protein; wherein the fusion protein comprises a signal peptide described herein linked to the N-terminus of a mature polypeptide; and wherein the signal peptide is foreign to the mature polypeptide.

[0087] The mature polypeptide may be any polypeptide described herein, such as an alpha-amylase, protease, beta-glucosidase or glucoamylase.

[0088] In some embodiments, the fusion protein comprises a native signal peptide of the mature polypeptide that is altered (e.g., deletion of up to 50%, 60%, 70%, 80%, 90%, or 95% of sequence) and/or completely replaced with foreign signal peptide described herein. In some embodiments, the fusion protein lacks a signal peptide that is native to the mature polypeptide.

### Host Cells and Fermenting Organisms

[0089] The host cells and fermenting organisms described herein may be derived from any host cell known to the skilled artisan, such as a cell capable of producing a fermentation product (e.g., ethanol). As used herein, a “derivative” of strain is derived from a referenced strain, such as through mutagenesis, recombinant DNA technology, mating, cell fusion, or cytoduction between yeast strains. Those skilled in the art will understand that the genetic alterations, including metabolic modifications exemplified herein, may be described with reference to a suitable host organism and their corresponding metabolic reactions or a suitable source organism for desired genetic material such as genes for a desired metabolic pathway. However, given the complete genome sequencing of a wide variety of organisms and the high level of skill in the area of genomics, those skilled in the art can apply the teachings and guidance provided herein to other organisms. For example, the metabolic alterations exemplified herein can readily be applied to other species by incorporating the same or analogous encoding nucleic acid from species other than the referenced species.

[0090] The host cells encoding the fusion proteins described herein can be from any suitable host, such as a yeast strain, including, but not limited to, a Saccharomyces, Rhodotorula, Schizosaccharomyces, Kluyveromyces, Pichia, Hansenula, Rhodosporidium, Candida, Yarrowia, Lipomyces, Cryptococcus, or Dekkera sp. cell. In particular, Saccharomyces host cells are contemplated, such as Saccharomyces cerevisiae, bayanus or carlsbergensis cells. Preferably, the yeast cell is a Saccharomyces cerevisiae cell. Suitable cells can, for example, be derived from commercially available strains and polyploid or aneuploid industrial strains, including but not limited to those from Superstart™, THERMOSACC®, C5 FUEL™, XyloFerm®, etc. (Lallemand); RED STAR and ETHANOL RED® (Fermentis/Lesaffre); FALI (AB Mauri); Baker's Best Yeast, Baker's Compressed Yeast, etc. (Fleishmann's Yeast); BIOFERM AFT, XP, CF, and XR (North American Bioproducts Corp.); Turbo Yeast (Gert Strand AB); and FERMIOL® (DSM Specialties). Other useful yeast strains are available from biological depositories such as the American Type Culture Collection (ATCC) or the Deutsche Sammlung von Mikroorganismen and Zellkulturen GmbH (DSMZ), such as, e.g., BY4741 (e.g., ATCC 201388); Y108-1 (ATCC PTA.10567) and NRRL YB-1952 (ARS Culture Collection). Still other S. cerevisiae strains suitable as host cells DBY746, [Alpha][Eta]22, S150-2B, GPY55-15Ba, CEN.PK, USM21, TMB3500, TMB3400, VTT-A-63015, VTT-A-85068, VTT-c-79093 and their derivatives as well as Saccharomyces sp. 1400, 424A (LNH-ST), 259A (LNH-ST) and derivatives thereof. In one embodiment, the recombinant cell is a derivative of a strain Saccharomyces cerevisiae CIBTS1260 (deposited under Accession No. NRRL Y-50973 at the Agricultural Research Service Culture Collection (NRRL), Illinois 61604 U.S.A.).

[0091] The host cell or fermenting organism may be Saccharomyces strain, e.g., Saccharomyces cerevisiae strain produced using the method described and concerned in U.S. Pat. No. 8,257,959-BB.

[0092] The strain may also be a derivative of Saccharomyces cerevisiae strain NMI V14/004037 (See, WO2015/143324 and WO2015/143317 each incorporated herein by reference), strain nos. V15/004035, V15/004036, and V15/004037 (See, WO2016/153924 incorporated herein by reference), strain nos. V15/001459, V15/001460, V15/001461 (See, WO2016/138437 incorporated herein by reference), strain no. NRRL Y67342 (See, WO2018/098381 incorporated herein by reference), strain nos. NRRL Y67549 and NRRL Y67700 (See, PCT/US2019/018249 incorporated herein by reference), or any strain described in WO2017/087330 (incorporated herein by reference).

[0093] The fermenting organisms according to the invention have been generated in order to, e.g., improve fermentation yield and to improve process economy by cutting enzyme costs since part or all of the necessary enzymes needed to improve method performance are be produced by the fermenting organism.

[0094] The host cells and fermenting organisms described herein may utilize expression vectors comprising the coding sequence of one or more (e.g., two, several) heterologous genes linked to one or more control sequences that direct expression in a suitable cell under conditions compatible with the control sequence(s). Such expression vectors may be used in any of the cells and methods described herein. The polynucleotides described herein may be manipulated in a variety of ways to provide for expression of a desired polypeptide. Manipulation of the polynucleotide prior to its insertion into a vector may be desirable or necessary depending on the expression vector. The techniques for modifying polynucleotides utilizing recombinant DNA methods are well known in the art.

[0095] A construct or vector (or multiple constructs or vectors) comprising the one or more (e.g., two, several) heterologous genes may be introduced into a cell so that the construct or vector is maintained as a chromosomal integrant or as a self-replicating extra-chromosomal vector as described earlier.

[0096] The various nucleotide and control sequences may be joined together to produce a recombinant expression vector that may include one or more (e.g., two, several) convenient restriction sites to allow for insertion or substitution of the polynucleotide at such sites. Alternatively, the polynucleotide(s) may be expressed by inserting the polynucleotide(s) or a nucleic acid construct comprising the sequence into an appropriate vector for expression. In creating the expression vector, the coding sequence is located in the vector so that the coding sequence is operably linked with the appropriate control sequences for expression.

[0097] The recombinant expression vector may be any vector (e.g., a plasmid or virus) that can be conveniently subjected to recombinant DNA procedures and can bring about expression of the polynucleotide. The choice of the vector will typically depend on the compatibility of the vector with the host cell into which the vector is to be introduced. The vector may be a linear or closed circular plasmid.

[0098] The vector may be an autonomously replicating vector, i.e., a vector that exists as an extrachromosomal entity, the replication of which is independent of chromosomal replication, e.g., a plasmid, an extrachromosomal element, a minichromosome, or an artificial chromosome. The vector may contain any means for assuring self-replication. Alternatively, the vector may be one that, when introduced into the host cell, is integrated into the genome and replicated together with the chromosome(s) into which it has been integrated. Furthermore, a single vector or plasmid or two or more vectors or plasmids that together contain the total DNA to be introduced into the genome of the cell, or a transposon, may be used.

[0099] The expression vector may contain any suitable promoter sequence that is recognized by a cell for expression of a gene described herein. The promoter sequence contains transcriptional control sequences that mediate the expression of the polypeptide. The promoter may be any polynucleotide that shows transcriptional activity in the cell of choice including mutant, truncated, and hybrid promoters, and may be obtained from genes encoding extracellular or intracellular polypeptides either homologous or heterologous to the cell.

[0100] Each heterologous polynucleotide described herein may be operably linked to a promoter that is foreign to the polynucleotide. For example, in one embodiment, the nucleic acid construct encoding the fusion protein is operably linked to a promoter foreign to the polynucleotide. The promoters may be identical to or share a high degree of sequence identity (e.g., at least about 80%, at least about 85%, at least about 90%, at least about 95%, at least about 96%, at least about 97%, at least about 98%, or at least about 99%) with a selected native promoter.

[0101] Examples of suitable promoters for directing the transcription of the nucleic acid constructs in a yeast cells, include, but are not limited to, the promoters obtained from the genes for enolase, (e.g., S. cerevisiae enolase or I. orientalis enolase (ENO1)), galactokinase (e.g., S. cerevisiae galactokinase or I. orientalis galactokinase (GAL1)), alcohol dehydrogenase/glyceraldehyde-3-phosphate dehydrogenase (e.g., S. cerevisiae alcohol dehydrogenase/glyceraldehyde-3-phosphate dehydrogenase or I. orientalis alcohol dehydrogenase/glyceraldehyde-3-phosphate dehydrogenase (ADH1, ADH2/GAP)), triose phosphate isomerase (e.g., S. cerevisiae triose phosphate isomerase or I. orientalis triose phosphate isomerase (TPI)), metallothionein (e.g., S. cerevisiae metallothionein or I. orientalis metallothionein (CUP1)), 3-phosphoglycerate kinase (e.g., S. cerevisiae 3-phosphoglycerate kinase or I. orientalis 3-phosphoglycerate kinase (PGK)), PDC1, xylose reductase (XR), xylitol dehydrogenase (XDH), L-(+)-lactate-cytochrome c oxidoreductase (CYB2), translation elongation factor-1 (TEF1), translation elongation factor-2 (TEF2), glyceraldehyde-3-phosphate dehydrogenase (GAPDH), and orotidine 5′-phosphate decarboxylase (URA3) genes. Other suitable promoters may be obtained from S. cerevisiae TDH3, HXT7, PGK1, RPL18B and CCW12 genes. Additional useful promoters for yeast host cells are described by Romanos et al., 1992, Yeast 8: 423-488.

[0102] The control sequence may also be a suitable transcription terminator sequence, which is recognized by a host cell to terminate transcription. The terminator sequence is operably linked to the 3′-terminus of the polynucleotide encoding the polypeptide. Any terminator that is functional in the yeast cell of choice may be used. The terminator may be identical to or share a high degree of sequence identity (e.g., at least about 80%, at least about 85%, at least about 90%, at least about 95%, at least about 96%, at least about 97%, at least about 98%, or at least about 99%) with the selected native terminator.

[0103] Suitable terminators for yeast host cells may be obtained from the genes for enolase (e.g., S. cerevisiae or I. orientalis enolase cytochrome C (e.g., S. cerevisiae or I. orientalis cytochrome (CYC1)), glyceraldehyde-3-phosphate dehydrogenase (e.g., S. cerevisiae or I. orientalis glyceraldehyde-3-phosphate dehydrogenase (gpd)), PDC1, XR, XDH, transaldolase (TAL), transketolase (TKL), ribose 5-phosphate ketol-isomerase (RKI), CYB2, and the galactose family of genes (especially the GAL10 terminator). Other suitable terminators may be obtained from S. cerevisiae ENO2 or TEF1 genes. Additional useful terminators for yeast host cells are described by Romanos et al., 1992, supra.

[0104] The control sequence may also be an mRNA stabilizer region downstream of a promoter and upstream of the coding sequence of a gene which increases expression of the gene.

[0105] Examples of suitable mRNA stabilizer regions are obtained from a Bacillus thuringiensis cryIIIA gene (WO 94/25612) and a Bacillus subtilis SP82 gene (Hue et al., 1995, Journal of Bacteriology 177: 3465-3471).

[0106] The control sequence may also be a suitable leader sequence, when transcribed is a non-translated region of an mRNA that is important for translation by the host cell. The leader sequence is operably linked to the 5′-terminus of the polynucleotide encoding the polypeptide. Any leader sequence that is functional in the yeast cell of choice may be used.

[0107] Suitable leaders for yeast host cells are obtained from the genes for enolase (e.g., S. cerevisiae or I. orientalis enolase (ENO-1)), 3-phosphoglycerate kinase (e.g., S. cerevisiae or I. orientalis 3-phosphoglycerate kinase), alpha-factor (e.g., S. cerevisiae or I. orientalis alpha-factor), and alcohol dehydrogenase/glyceraldehyde-3-phosphate dehydrogenase (e.g., S. cerevisiae or I. orientalis alcohol dehydrogenase/glyceraldehyde-3-phosphate dehydrogenase (ADH2/GAP)).

[0108] The control sequence may also be a polyadenylation sequence; a sequence operably linked to the 3′-terminus of the polynucleotide and, when transcribed, is recognized by the host cell as a signal to add polyadenosine residues to transcribed mRNA. Any polyadenylation sequence that is functional in the host cell of choice may be used. Useful polyadenylation sequences for yeast cells are described by Guo and Sherman, 1995, Mol. Cellular Biol. 15: 5983-5990.

[0109] The control sequence may also be a signal peptide coding region that encodes a signal peptide linked to the N-terminus of a polypeptide and directs the polypeptide into the cell's secretory pathway. The 5′-end of the coding sequence of the polynucleotide may inherently contain a signal peptide coding sequence naturally linked in translation reading frame with the segment of the coding sequence that encodes the polypeptide. Alternatively, the 5′-end of the coding sequence may contain a signal peptide coding sequence that is foreign to the coding sequence. A foreign signal peptide coding sequence may be required where the coding sequence does not naturally contain a signal peptide coding sequence. Alternatively, a foreign signal peptide coding sequence may simply replace the natural signal peptide coding sequence in order to enhance secretion of the polypeptide. However, any signal peptide coding sequence that directs the expressed polypeptide into the secretory pathway of a host cell may be used. Useful signal peptides for yeast host cells are obtained from the genes for Saccharomyces cerevisiae alpha-factor and Saccharomyces cerevisiae invertase. Other useful signal peptide coding sequences are described by Romanos et al., 1992, supra. Signal peptides of the present invention are described in more detail below under the section “Signal Peptides”.

[0110] The control sequence may also be a propeptide coding sequence that encodes a propeptide positioned at the N-terminus of a polypeptide. The resultant polypeptide is known as a proenzyme or propolypeptide (or a zymogen in some cases). A propolypeptide is generally inactive and can be converted to an active polypeptide by catalytic or autocatalytic cleavage of the propeptide from the propolypeptide. The propeptide coding sequence may be obtained from the genes for Bacillus subtilis alkaline protease (aprE), Bacillus subtilis neutral protease (nprT), Myceliophthora thermophila laccase (WO 95/33836), Rhizomucor miehei aspartic proteinase, and Saccharomyces cerevisiae alpha-factor.

[0111] Where both signal peptide and propeptide sequences are present, the propeptide sequence is positioned next to the N-terminus of a polypeptide and the signal peptide sequence is positioned next to the N-terminus of the propeptide sequence.

[0112] It may also be desirable to add regulatory sequences that allow the regulation of the expression of the polypeptide relative to the growth of the host cell. Examples of regulatory systems are those that cause the expression of the gene to be turned on or off in response to a chemical or physical stimulus, including the presence of a regulatory compound. Regulatory systems in prokaryotic systems include the lac, tac, and trp operator systems. In yeast, the ADH2 system or GAL1 system may be used.

[0113] The vectors may contain one or more (e.g., two, several) selectable markers that permit easy selection of transformed, transfected, transduced, or the like cells. A selectable marker is a gene the product of which provides for biocide or viral resistance, resistance to heavy metals, prototrophy to auxotrophs, and the like. Suitable markers for yeast host cells include, but are not limited to, ADE2, HIS3, LEU2, LYS2, MET3, TRP1, and URA3.

[0114] The vectors may contain one or more (e.g., two, several) elements that permit integration of the vector into the host cell's genome or autonomous replication of the vector in the cell independent of the genome.

[0115] For integration into the host cell genome, the vector may rely on the polynucleotide's sequence encoding the polypeptide or any other element of the vector for integration into the genome by homologous or non-homologous recombination. Alternatively, the vector may contain additional polynucleotides for directing integration by homologous recombination into the genome of the host cell at a precise location(s) in the chromosome(s). To increase the likelihood of integration at a precise location, the integrational elements should contain a sufficient number of nucleic acids, such as 100 to 10,000 base pairs, 400 to 10,000 base pairs, and 800 to 10,000 base pairs, which have a high degree of sequence identity to the corresponding target sequence to enhance the probability of homologous recombination. The integrational elements may be any sequence that is homologous with the target sequence in the genome of the host cell. Furthermore, the integrational elements may be non-encoding or encoding polynucleotides. On the other hand, the vector may be integrated into the genome of the host cell by non-homologous recombination. Potential integration loci include those described in the art (e.g., See US2012/0135481).

[0116] For autonomous replication, the vector may further comprise an origin of replication enabling the vector to replicate autonomously in the yeast cell. The origin of replication may be any plasmid replicator mediating autonomous replication that functions in a cell. The term “origin of replication” or “plasmid replicator” means a polynucleotide that enables a plasmid or vector to replicate in vivo. Examples of origins of replication for use in a yeast host cell are the 2 micron origin of replication, ARS1, ARS4, the combination of ARS1 and CEN3, and the combination of ARS4 and CEN6.

[0117] More than one copy of a polynucleotide described herein may be inserted into a host cell to increase production of a polypeptide. An increase in the copy number of the polynucleotide can be obtained by integrating at least one additional copy of the sequence into the yeast cell genome or by including an amplifiable selectable marker gene with the polynucleotide where cells containing amplified copies of the selectable marker gene, and thereby additional copies of the polynucleotide, can be selected for by cultivating the cells in the presence of the appropriate selectable agent.

[0118] The procedures used to ligate the elements described above to construct the recombinant expression vectors described herein are well known to one skilled in the art (see, e.g., Sambrook et al., 1989, Molecular Cloning, A Laboratory Manual, 2d edition, Cold Spring Harbor, N.Y.).

[0119] Additional procedures and techniques known in the art for the preparation of recombinant cells for ethanol fermentation, are described in, e.g., WO2016/045569, the content of which is hereby incorporated by reference.

[0120] The host cell or fermenting organism may be in the form of a composition comprising a host cell or fermenting organism (e.g., a yeast strain described herein) and a naturally occurring and/or a non-naturally occurring component.

[0121] The host cell or fermenting organism described herein may be in any viable form, including crumbled, dry, including active dry and instant, compressed, cream (liquid) form etc. In one embodiment, the host cell or fermenting organism (e.g., a Saccharomyces cerevisiae yeast strain) is dry yeast, such as active dry yeast or instant yeast. In one embodiment, the host cell or fermenting organism (e.g., a Saccharomyces cerevisiae yeast strain) is crumbled yeast. In one embodiment, the host cell or fermenting organism (e.g., a Saccharomyces cerevisiae yeast strain) is compressed yeast. In one embodiment, the host cell or fermenting organism (e.g., a Saccharomyces cerevisiae yeast strain) is cream yeast.

[0122] In one embodiment is a composition comprising a host cell or fermenting organism described herein (e.g., a Saccharomyces cerevisiae), and one or more of the component selected from the group consisting of: surfactants, emulsifiers, gums, swelling agent, and antioxidants and other processing aids.

[0123] The compositions described herein may comprise a host cell or fermenting organism described herein (e.g., a Saccharomyces cerevisiae) and any suitable surfactants. In one embodiment, the surfactant(s) is/are an anionic surfactant, cationic surfactant, and/or nonionic surfactant.

[0124] The compositions described herein may comprise a host cell or fermenting organism described herein (e.g., a Saccharomyces cerevisiae) and any suitable emulsifier. In one embodiment, the emulsifier is a fatty-acid ester of sorbitan. In one embodiment, the emulsifier is selected from the group of sorbitan monostearate (SMS), citric acid esters of monodiglycerides, polyglycerolester, fatty acid esters of propylene glycol.

[0125] In one embodiment, the composition comprises a host cell or fermenting organism described herein (e.g., a Saccharomyces cerevisiae), and Olindronal SMS, Olindronal SK, or Olindronal SPL including composition concerned in European Patent No. 1,724,336 (hereby incorporated by reference). These products are commercially available from Bussetti, Austria, for active dry yeast.

[0126] The compositions described herein may comprise a host cell or fermenting organism described herein (e.g., a Saccharomyces cerevisiae) and any suitable gum. In one embodiment, the gum is selected from the group of carob, guar, tragacanth, arabic, xanthan and acacia gum, in particular for cream, compressed and dry yeast.

[0127] The compositions described herein may comprise a host cell or fermenting organism described herein (e.g., a Saccharomyces cerevisiae) and any suitable swelling agent. In one embodiment, the swelling agent is methyl cellulose or carboxymethyl cellulose.

[0128] The compositions described herein may comprise a host cell or fermenting organism described herein (e.g., a Saccharomyces cerevisiae) and any suitable anti-oxidant. In one embodiment, the antioxidant is butylated hydroxyanisol (BHA) and/or butylated hydroxytoluene (BHT), or ascorbic acid (vitamin C), particular for active dry yeast.

### Signal Peptides

[0129] As shown in the Examples section below, the Applicant has found that certain signal peptides linked to the N-terminus of mature polypeptides (e.g., foreign glucoamylases, proteases, beta-glucosidases and alpha-amylases) lead to enhanced secretion of functional enzyme.

[0130] Signal peptides that may be expressed as part of the nucleic acid construct or expression vectors include, but are not limited to, signal sequences shown in Table 1 (or derivatives thereof).

TABLE 1

| | | | | Signal |
|---|---|---|---|---|
| Signal | | | Signal | coding |
| Identifier | Donor Organism | Donor Source Peptide | SEQ ID | SEQ ID |
| SP1 | Acremonium alcalophium | GH25 lysozyme | 244 | 340 |
| SP2 | Aspergillus fumigatus | Cellobiohydrolase 1 | 245 | 341 |
| SP3 | Aspergillus fumigatus | Cellobiohydrolase 2 | 246 | 342 |
| SP4 | Ambrosiozyma monospora | Glucoamylase | 247 | 343 |
| SP5 | Aspergillus oryzae | Alpha-amylase | 248 | 344 |
| SP6 | Candida blankii | Glucoamylase | 249 | 345 |
| SP7 | Candida homilentoma | Glucoamylase | 250 | 346 |
| SP8 | Candida silvanorum | Glucoamylase | 251 | 347 |
| SP9 | Dekkera bruxellensis | Glucoamylase | 252 | 348 |
| SP10 | Filobasidium capsuligenum | Glucoamylase | 253 | 349 |
| SP11 | Gloeophyllum sepiarium | Glucoamylase | 254 | 350 |
| SP12 | Gloeophyllum trabeum | Glucoamylase | 255 | 351 |
| SP13 | Homo sapiens | Alpha-2-glycoprotein | 256 | 352 |
| SP14 | Hyphopichia burtonii | Glucoamylase | 257 | 353 |
| SP15 | Kluyveromyces marxianus | polygalacturonase | 258 | 354 |
| SP16 | Nakazawaea ernobii | Glucoamylase | 259 | 355 |
| SP17 | Nakazawaea ernobii | Glucoamylase | 260 | 356 |
| SP18 | Ogataea methanolica | Glucoamylase | 261 | 357 |
| SP19 | Pycnoporus sanguineus | Glucoamylase | 262 | 358 |
| SP20 | Pichia pastoris | | 263 | 359 |
| SP21 | Pichia pastoris | | 264 | 360 |
| SP22 | Pichia pastoris | | 265 | 361 |
| SP23 | Pichia pastoris | | 266 | 362 |
| SP24 | Pichia pastoris | | 267 | 363 |
| SP25 | Pichia stipitis | Glucoamylase | 268 | 364 |
| SP26 | Rhizomucor pusillus | Alpha-amylase | 269 | 365 |
| SP27 | Saccharomycopsis fibuligera | Glucoamylase | 270 | 366 |
| SP28 | Saccharomyces cerevisiae | Invertase | 271 | 367 |
| SP29 | Saccharomyces cerevisiae | Adhesion subunit of α- | 272 | 368 |
| | | agglutinin | | |
| SP30 | Saccharomyces cerevisiae | Chitin trans-glycosylase | 273 | 369 |
| SP31 | Saccharomyces cerevisiae | Exo-1,3-β Glucanase | 274 | 370 |
| SP32 | Saccharomyces cerevisiae | Phospholipase B | 275 | 371 |
| SP33 | Saccharomyces cerevisiae | Cell wall protein related to | 276 | 372 |
| | | glucanases | | |
| SP34 | Saccharomyces cerevisiae | Mating pheromone α-factor | 277 | 373 |
| SP35 | Saccharomyces cerevisiae | Cell wall-associated protein | 278 | 374 |
| | | involved in export of | | |
| | | acetylated sterols | | |
| SP36 | Saccharomyces cerevisiae | Dolichyl- | 279 | 375 |
| | | diphosphooligosaccharide-- | | |
| | | protein glycosyltransferase | | |
| | | subunit 1 | | |
| SP37 | Saccharomyces cerevisiae | Phospholipase B | 280 | 376 |
| SP38 | Saccharomyces cerevisiae | Exo-β-1,3-Glucanase | 281 | 377 |
| SP39 | Saccharomyces cerevisiae | Cell wall-associated protein | 282 | 378 |
| | | involved in export of | | |
| | | acetylated sterols | | |
| SP40 | Saccharomyces cerevisiae | Aspartic protease | 283 | 379 |
| SP41 | Saccharomyces cerevisiae | Cell wall mannoprotein | 284 | 380 |
| SP42 | Saccharomyces cerevisiae | Cell wall mannoprotein | 285 | 381 |
| SP43 | Saccharomyces cerevisiae | Exo-1,3-β-glucanase | 286 | 382 |
| SP44 | Saccharomyces cerevisiae | Acid phosphatase | 287 | 383 |
| SP45 | Saccharomyces cerevisiae | Cell wall protein | 288 | 384 |
| SP46 | Saccharomyces cerevisiae | Acid phosphatase | 289 | 385 |
| SP47 | Saccharomyces cerevisiae | Acid phosphatase | 290 | 386 |
| SP48 | Saccharomyces cerevisiae | Covalently-bound cell wall | 291 | 387 |
| | | protein | | |
| SP49 | Saccharomyces cerevisiae | Protein Disulfide Isomerase | 292 | 388 |
| SP50 | Saccharomyces cerevisiae | | 293 | 389 |
| SP51 | Saccharomyces cerevisiae | Cell wall mannoprotein | 294 | 390 |
| SP52 | Saccharomyces cerevisiae | Aspartic proteinase | 295 | 391 |
| SP53 | Saccharomyces cerevisiae | Exo-1,3-β Glucanase | 296 | 392 |
| SP54 | Saccharomyces cerevisiae | Chitin transglycosylase | 297 | 393 |
| SP55 | Saccharomyces cerevisiae | | 298 | 394 |
| SP56 | Saccharomyces cerevisiae | Aspartyl protease | 299 | 395 |
| SP57 | Saccharomyces cerevisiae | Endoprotease of a-factor | 300 | 396 |
| | | mating pheromone | | |
| SP58 | Saccharomyces cerevisiae | Bud site selection protein | 301 | 397 |
| SP59 | Saccharomyces cerevisiae | Aspartic proteinase yapsin-3 | 302 | 398 |
| SP60 | Saccharomyces cerevisiae | Ferro-O2-oxidoreductase | 303 | 399 |
| SP61 | Saccharomyces cerevisiae | 1,3-beta- | 304 | 400 |
| | | glucanosyltransferase | | |
| SP62 | Saccharomyces cerevisiae | Carboxypeptidase | 305 | 401 |
| SP63 | Saccharomyces cerevisiae | 1,3-beta- | 306 | 402 |
| | | glucanosyltransferase | | |
| SP64 | Saccharomyces cerevisiae | Cell wall-related secretory | 307 | 403 |
| | | glycoprotein | | |
| SP65 | Saccharomyces cerevisiae | Glycosylphosphatidylinositol | 308 | 404 |
| | | (GPI)-anchored cell wall | | |
| | | endoglucanase | | |
| SP66 | Saccharomyces cerevisiae | Endo-1,3(4)-beta-glucanase | 309 | 405 |
| | | 1 | | |
| SP67 | Saccharomyces cerevisiae | Phospholipase B | 310 | 406 |
| SP68 | Saccharomyces cerevisiae | 1,3-beta- | 311 | 407 |
| | | glucanosyltransferase | | |
| SP69 | Saccharomyces cerevisiae | Putative GPI-anchored | 312 | 408 |
| | | protein | | |
| SP70 | Saccharomyces cerevisiae | VEL1-related protein | 313 | 409 |
| SP71 | Saccharomyces cerevisiae | Endo-beta-1,3-glucanase | 314 | 410 |
| SP72 | Saccharomyces cerevisiae | Seripauperin-3 | 315 | 411 |
| SP73 | Saccharomyces cerevisiae | Seripauperin-5 | 316 | 412 |
| SP74 | Saccharomyces cerevisiae | Cell wall mannoprotein | 317 | 413 |
| SP75 | Saccharomyces cerevisiae | GPI-anchored cell surface | 318 | 414 |
| | | glycoprotein (flocculin) | | |
| SP76 | Saccharomyces cerevisiae | Cell wall mannoprotein | 319 | 415 |
| SP77 | Saccharomyces cerevisiae | Cold shock-induced protein | 320 | 416 |
| SP78 | Saccharomyces cerevisiae | Cell wall protein | 321 | 417 |
| SP79 | Saccharomyces cerevisiae | Stress-induced structural | 322 | 418 |
| | | GPI-cell wall glycoprotein | | |
| SP80 | Saccharomyces cerevisiae | Mating pheromone alpha-factor | 323 | 419 |
| SP81 | Saccharomyces cerevisiae | Signaling mucin | 324 | 420 |
| SP82 | Saccharomyces cerevisiae | Cell wall protein | 325 | 421 |
| SP83 | Saccharomyces cerevisiae | Cell wall synthesis protein | 326 | 422 |
| SP84 | Saccharomyces cerevisiae | Sterol binding protein | 327 | 423 |
| SP85 | Saccharomyces cerevisiae | Cell Wall protein | 328 | 424 |
| SP86 | Saccharomycopsis | Glucoamylase | 329 | 425 |
| | capsularis | | | |
| SP87 | Saccharomycopsis | Glucoamylase | 330 | 426 |
| | capsularis | | | |
| SP88 | Saccharomycopsis fibuligera | Glucoamylase | 331 | 427 |
| SP89 | Saitozyma flava | Glucoamylase | 332 | 428 |
| SP90 | Schwanniomyces | Glucoamylase | 333 | 429 |
| | occidentalis | | | |
| SP91 | Talaromyces leycetannus | Beta-mannase | 334 | 430 |
| SP92 | Trichophaea sacatta | GH24 lysozyme | 335 | 431 |
| SP93 | Talaromyces emersonii | Glucoamylase | 336 | 432 |
| SP94 | Trichoderma reesei | Cellobiohydrolase 1 | 337 | 433 |
| SP95 | Trichoderma reesei | Cellobiohydrolase 2 | 338 | 434 |
| SP96 | Humicola insolens | Cel45 | 339 | 435 |

[0131] Techniques used to isolate or clone polynucleotides encoding signal peptides are described herein.

[0132] In one embodiment, the signal peptide comprises or consists of the amino acid sequence of any one of the signal peptides described or referenced herein (e.g., any one of SEQ ID NOs: 244-339). In another embodiment, the signal peptide is a fragment of the any one of the signal peptide described or referenced herein (e.g., any one of SEQ ID NOs: 244-339). In one embodiment, the number of amino acid residues in the fragment is at least 75%, e.g., at least 80%, 85%, 90%, or 95% of the number of amino acid residues in referenced full length signal peptide (e.g. any one of SEQ ID NOs: 244-339).

[0133] The signal peptide may be a variant of any one of the signal peptides described supra (e.g., any one of SEQ ID NOs: 244-339). In one embodiment, the signal peptide has at least 60%, e.g., at least 65%, 70%, 75%, 80%, 85%, 90%, 95%, 97%, 98%, 99%, or 100% sequence identity to any one of the signal peptides described supra (e.g., any one of SEQ ID NOs: 244-339).

[0134] Examples of suitable amino acid changes, such as conservative substitutions that do not significantly affect the folding and/or activity of the signal peptide, are described herein.

[0135] In one embodiment, the signal peptide has a sequence that differs by no more than ten amino acids, e.g., by no more than five amino acids, by no more than four amino acids, by no more than three amino acids, by no more than two amino acids, or by one amino acid from the amino acid sequence of any one of the signal peptides described supra (e.g., any one of SEQ ID NOs: 244-339). In one embodiment, the signal peptide has an amino acid substitution, deletion, and/or insertion of one or more (e.g., two, several) of amino acid sequence of any one of the signal peptides described supra (e.g., any one of SEQ ID NOs: 244-339). In some embodiments, the total number of amino acid substitutions, deletions and/or insertions is not more than 10, e.g., not more than 9, 8, 7, 6, 5, 4, 3, 2, or 1.

[0136] In one embodiment, the signal peptide coding sequence hybridizes under at least low stringency conditions, e.g., medium stringency conditions, medium-high stringency conditions, high stringency conditions, or very high stringency conditions with the full-length complementary strand of the coding sequence from any signal peptide described or referenced herein (e.g., any coding sequence of SEQ ID NOs: 340-435). In one embodiment, the signal peptide coding sequence has at least 65%, e.g., at least 70%, at least 75%, at least 80%, at least 85%, at least 85%, at least 90%, at least 91%, at least 92%, at least 93%, at least 94%, at least 95%, at least 96%, at least 97%, at least 98%, at least 99%, or 100% sequence identity with the coding sequence from any signal peptide described or referenced herein (e.g., any coding sequence of SEQ ID NOs: 340-435).

[0137] In one embodiment, the signal peptide comprises the coding sequence of any signal peptide described or referenced herein (any coding sequence of SEQ ID NOs: 340-435). In one embodiment, the signal peptide comprises a coding sequence that is a subsequence of the coding sequence from any signal peptide described or referenced herein. In one embodiment, the number of nucleotides residues in the subsequence is at least 75%, e.g., at least 80%, 85%, 90%, or 95% of the number of the referenced coding sequence.

[0138] The referenced coding sequence of any related aspect or embodiment described herein can be the native coding sequence or a degenerate sequence, such as a codon-optimized coding sequence designed for use in a particular host cell (e.g., optimized for expression in Saccharomyces cerevisiae).

[0139] The signal peptides described herein may be fused directly to the mature polypeptide, or comprise a linker sequence located between the signal peptide and the mature polypeptide. Exemplary linkers sequences may include one or more amino acids such as up to 5, 10, 15, 20, 25, 30, 35, 50, 100, or 200 amino acids. The linker may include amino acids that cause the linker to be rigid and prevent interactions between the secretion signal and other portions of the mature polypeptide. Rigid linkers may include residues such as Pro, Arg, Phe, Thr, Glu, and Gin, and frequently form alpha-helical structures. Alternatively, the encoded linker may be flexible. Flexible linkers can include glycine residues and connect the signal sequence to the glucoamylase portion of the fusion protein without interfering with their respective functions. In some linker sequences the majority (>50%) of the amino acids residues are glycine. Exemplary linker sequences include one or more linker block(s), with each block having one or more glycine residues and one amino acid selected from serine, glutamic acid, aspartic acid, and lysine. For example, linker region can include the formula [GₐX]ₙ, wherein a is an integer in the range of 1-6, X is S, E, D, or K, and n is an integer in the range of 1-10. In some embodiments, the signal peptide is linked to the mature polypeptide with a linker having a protease cleavage sequence. Exemplary protease cleavage sequences include those for thrombin, factor Xa, rhinovirus 3C, TEV protease, Ssp DnaB, intein, Sce VMA1 intein, enterokinase, and KEX2 (See, for example, Waugh, D. S., Protein Expr Purif. 80(2): 283-293, 2011; Zhou et al. , Microbial Cell Factories 13:44, 2014; and Bourbonnais et al , J. Bio. Chem. 263(30): 15342, 1988)

### Glucoamylases

[0140] The host cells and fermenting organisms may express a heterologous glucoamylase (e.g., as a fusion protein of the invention). The glucoamylase can be any glucoamylase that is suitable for the host cells, fermenting organisms and/or their methods of use described herein, such as a naturally occurring glucoamylase or a variant thereof that retains glucoamylase activity. Any glucoamylase contemplated for expression by a host cell or fermenting organism described below is also contemplated for embodiments of the invention involving exogenous addition of a glucoamylase (e.g., added before, during or after liquefaction and/or saccharification).

[0141] In some embodiments, the host cell or fermenting organism comprises a heterologous polynucleotide encoding a glucoamylase, for example, as described in WO2017/087330, the content of which is hereby incorporated by reference. Any glucoamylase described or referenced herein is contemplated for expression in the host cell or fermenting organism.

[0142] In some embodiments, the host cell or fermenting organism comprising a heterologous polynucleotide encoding a glucoamylase has an increased level of glucoamylase activity compared to the host cells without the heterologous polynucleotide encoding the glucoamylase, when cultivated under the same conditions. In some embodiments, the host cell or fermenting organism has an increased level of glucoamylase activity of at least 5%, e.g., at least 10%, at least 15%, at least 20%, at least 25%, at least 50%, at least 100%, at least 150%, at least 200%, at least 300%, or at 500% compared to the host cell or fermenting organism without the heterologous polynucleotide encoding the glucoamylase, when cultivated under the same conditions (e.g., as described in Example 3).

[0143] Exemplary glucoamylases that can be used with the host cells and/or the methods described herein include bacterial, yeast, or filamentous fungal glucoamylases, e.g., obtained from any of the microorganisms described or referenced herein.

[0144] The glucoamylase may be derived from any suitable source, e.g., derived from a microorganism or a plant.

[0145] The glucoamylase may be a bacterial glucoamylase. For example, the glucoamylase may be derived from a Gram-positive bacterium such as a Bacillus, Clostridium, Enterococcus, Geobacillus, Lactobacillus, Lactococcus, Oceanobacillus, Staphylococcus, Streptococcus, or Streptomyces, or a Gram-negative bacterium such as a Campylobacter, E. coli, Flavobacterium, Fusobacterium, Helicobacter, Ilyobacter, Neisseria, Pseudomonas, Salmonella, or Ureaplasma.

[0146] In one embodiment, the glucoamylase is derived from Bacillus alkalophilus, Bacillus amyloliquefaciens, Bacillus brevis, Bacillus circulans, Bacillus clausii, Bacillus coagulans, Bacillus firmus, Bacillus lautus, Bacillus lentus, Bacillus licheniformis, Bacillus megaterium, Bacillus pumilus, Bacillus stearothermophilus, Bacillus subtilis, or Bacillus thuringiensis.

[0147] In another embodiment, the glucoamylase is derived from Streptococcus equisimilis, Streptococcus pyogenes, Streptococcus uberis, or Streptococcus equi subsp. Zooepidemicus.

[0148] In another embodiment, the glucoamylase is derived from Streptomyces achromogenes, Streptomyces avermitilis, Streptomyces coelicolor, Streptomyces griseus, or Streptomyces lividans.

[0149] The glucoamylase may be a fungal glucoamylase. For example, the glucoamylase may be derived from a yeast such as a Candida, Kluyveromyces, Pichia, Saccharomyces, Schizosaccharomyces, Yarrowia or Issatchenkia; or derived from a filamentous fungus such as an Acremonium, Agaricus, Alternaria, Aspergillus, Aureobasidium, Botryospaeria, Ceriporiopsis, Chaetomidium, Chrysosporium, Claviceps, Cochliobolus, Coprinopsis, Coptotermes, Corynascus, Cryphonectria, Cryptococcus, Diplodia, Exidia, Filibasidium, Fusarium, Gibberella, Holomastigotoides, Humicola, lrpex, Lentinula, Leptospaeria, Magnaporthe, Melanocarpus, Meripilus, Mucor, Myceliophthora, Neocallimastix, Neurospora, Paecilomyces, Penicillium, Phanerochaete, Piromyces, Poitrasia, Pseudoplectania, Pseudotrichonympha, Rhizomucor, Schizophyllum, Scytalidium, Talaromyces, Thermoascus, Thielavia, Tolypocladium, Trichoderma, Trichophaea, Verticillium, Volvariella, or Xylaria.

[0150] In another embodiment, the glucoamylase is derived from Saccharomyces carlsbergensis, Saccharomyces cerevisiae, Saccharomyces diastaticus, Saccharomyces douglasii, Saccharomyces kluyveri, Saccharomyces norbensis, or Saccharomyces oviformis.

[0151] In another embodiment, the glucoamylase is derived from Acremonium cellulolyticus, Aspergillus aculeatus, Aspergillus awamori, Aspergillus foetidus, Aspergillus fumigatus, Aspergillus japonicus, Aspergillus nidulans, Aspergillus niger, Aspergillus oryzae, Chrysosporium inops, Chrysosporium keratinophilum, Chrysosporium lucknowense, Chrysosporium merdarium, Chrysosporium pannicola, Chrysosporium queenslandicum, Chrysosporium tropicum, Chrysosporium zonatum, Fusarium bactridioides, Fusarium cerealis, Fusarium crookwellense, Fusarium culmorum, Fusarium graminearum, Fusarium graminum, Fusarium heterosporum, Fusarium negundi, Fusarium oxysporum, Fusarium reticulatum, Fusarium roseum, Fusarium sambucinum, Fusarium sarcochroum, Fusarium sporotrichioides, Fusarium sulphureum, Fusarium torulosum, Fusarium trichothecioides, Fusarium venenatum, Humicola grisea, Humicola insolens, Humicola lanuginosa, Irpex lacteus, Mucor miehei, Myceliophthora thermophila, Neurospora crassa, Penicillium funiculosum, Penicillium purpurogenum, Phanerochaete chrysosporium, Thielavia achromatica, Thielavia albomyces, Thielavia albopilosa, Thielavia australeinsis, Thielavia fimeti, Thielavia microspora, Thielavia ovispora, Thielavia peruviana, Thielavia setosa, Thielavia spededonium, Thielavia subthermophila, Thielavia terrestris, Trichoderma harzianum, Trichoderma koningii, Trichoderma longibrachiatum, Trichoderma reesei, or Trichoderma viride.

[0152] Preferred glucoamylases are of fungal or bacterial origin, selected from the group consisting of Aspergillus glucoamylases, in particular Aspergillus niger G1 or G2 glucoamylase (Boel et al. (1984), EMBO J. 3 (5), p. 1097-1102), or variants thereof, such as those disclosed in WO92/00381, WO00/04136 and WO01/04273 (from Novozymes, Denmark); the A. awamori glucoamylase disclosed in WO84/02921, Aspergillus oryzae glucoamylase (Agric. Biol. Chem. (1991), 55 (4), p. 941-949), or variants or fragments thereof. Other Aspergillus glucoamylase variants include variants with enhanced thermal stability: G137A and G139A (Chen et al. (1996), Prot. Eng. 9, 499-505); D257E and D293E/Q (Chen et al. (1995), Prot. Eng. 8, 575-582); N182 (Chen et al. (1994), Biochem. J. 301, 275-281); disulphide bonds, A246C (Fierobe et al. (1996), Biochemistry, 35, 8698-8704; and introduction of Pro residues in position A435 and S436 (Li et al. (1997), Protein Eng. 10, 1199-1204.

[0153] Other glucoamylases include Athelia rolfsii (previously denoted Corticium rolfsii) glucoamylase (see U.S. Pat. No. 4,727,026 and (Nagasaka et al. (1998) “Purification and properties of the raw-starch-degrading glucoamylases from Corticium rolfsii, Appl Microbiol Biotechnol 50:323-330), Talaromyces glucoamylases, in particular derived from Talaromyces emersonii (WO 99/28448), Talaromyces leycettanus (U.S. Pat. No. Re. 32,153), Talaromyces duponti, Talaromyces thermophilus (U.S. Pat. No. 4,587,215). In one embodiment, the glucoamylase used during saccharification and/or fermentation is the Talaromyces emersonii glucoamylase disclosed in WO99/28448.

[0154] Bacterial glucoamylases contemplated include glucoamylases from the genus Clostridium, in particular C. thermoamylolyticum (EP 135,138), and C. thermohydrosulfuricum (WO 86/01831).

[0155] Contemplated fungal glucoamylases include Trametes cingulate, Pachykytospora papyracea; and Leucopaxillus giganteus all disclosed in WO2006/069289; or Peniophora rufomarginata disclosed in WO2007/124285; or a mixture thereof. Also hybrid glucoamylase are contemplated. Examples include the hybrid glucoamylases disclosed in WO2005/045018.

[0156] In one embodiment, the glucoamylase is derived from a strain of the genus Pycnoporus, in particular a strain of Pycnoporus as described in WO2011/066576 (SEQ ID NO: 2, 4 or 6 therein), including the Pycnoporus sanguineus glucoamylase, or from a strain of the genus Gloeophyllum, such as a strain of Gloeophyllum sepiarium or Gloeophyllum trabeum, in particular a strain of Gloeophyllum as described in WO2011/068803 (SEQ ID NO: 2, 4, 6, 8, 10, 12, 14 or 16 therein). In one embodiment, the glucoamylase is SEQ ID NO: 2 in WO2011/068803 (i.e. Gloeophyllum sepiarium glucoamylase). In one embodiment, the glucoamylase is the Gloeophyllum sepiarium glucoamylase of SEQ ID NO: 8. In one embodiment, the glucoamylase is the Pycnoporus sanguineus glucoamylase of SEQ ID NO: 229.

[0157] In one embodiment, the glucoamylase is a Gloeophyllum trabeum glucoamylase (disclosed as SEQ ID NO: 3 in WO2014/177546). In another embodiment, the glucoamylase is derived from a strain of the genus Nigrofomes, in particular a strain of Nigrofomes sp. disclosed in WO2012/064351 (disclosed as SEQ ID NO: 2 therein).

[0158] Also contemplated are glucoamylases with a mature polypeptide sequence which exhibit a high identity to any of the above mentioned glucoamylases, i.e., at least 60%, such as at least 70%, at least 75%, at least 80%, at least 85%, at least 90%, at least 95%, at least 96%, at least 97%, at least 98%, at least 99% or even 100% identity to any one of the mature polypeptide sequences mentioned above.

[0159] In one embodiment, the glucoamylase is derived from the Debaryomyces occidentalis glucoamylase of SEQ ID NO: 102. In one embodiment, the glucoamylase is derived from the Saccharomycopsis fibuligera glucoamylase of SEQ ID NO: 103. In one embodiment, the glucoamylase is derived from the Saccharomycopsis fibuligera glucoamylase of SEQ ID NO: 104. In one embodiment, the glucoamylase is derived from the Saccharomyces cerevisiae glucoamylase of SEQ ID NO: 105. In one embodiment, the glucoamylase is derived from the Aspergillus niger glucoamylase of SEQ ID NO: 106. In one embodiment, the glucoamylase is derived from the Aspergillus oryzae glucoamylase of SEQ ID NO: 107. In one embodiment, the glucoamylase is derived from the Rhizopus oryzae glucoamylase of SEQ ID NO: 108. In one embodiment, the glucoamylase is derived from the Clostridium thermocellum glucoamylase of SEQ ID NO: 109. In one embodiment, the glucoamylase is derived from the Clostridium thermocellum glucoamylase of SEQ ID NO: 110. In one embodiment, the glucoamylase is derived from the Arxula adeninivorans glucoamylase of SEQ ID NO: 111. In one embodiment, the glucoamylase is derived from the Hormoconis resinae glucoamylase of SEQ ID NO: 112. In one embodiment, the glucoamylase is derived from the Aureobasidium pullulans glucoamylase of SEQ ID NO: 113.

[0160] In one embodiment, the glucoamylase is a Trichoderma reesei glucoamylase, such as the Trichoderma reesei glucoamylase of SEQ ID NO: 230.

[0161] In one embodiment, the glucoamylase has a Relative Activity heat stability at 85° C. of at least 20%, at least 30%, or at least 35% determined as described in Example 4 of WO2018/098381 (heat stability).

[0162] In one embodiment, the glucoamylase has a relative activity pH optimum at pH 5.0 of at least 90%, e.g., at least 95%, at least 97%, or 100% determined as described in Example 4 of WO2018/098381 (pH optimum).

[0163] In one embodiment, the glucoamylase has a pH stability at pH 5.0 of at least 80%, at least 85%, at least 90% determined as described in Example 4 of WO2018/098381 (pH stability).

[0164] In one embodiment, the glucoamylase, such as a Penicillium oxalicum glucoamylase variant, has a thermostability determined as DSC Td at pH 4.0 as described in Example 15 of WO2018/098381 of at least 70° C., preferably at least 75° C., such as at least 80° C., such as at least 81° C., such as at least 82° C., such as at least 83° C., such as at least 84° C., such as at least 85° C., such as at least 86° C., such as at least 87%, such as at least 88° C., such as at least 89° C., such as at least 90° C. In one embodiment, the glucoamylase, such as a Penicillium oxalicum glucoamylase variant, has a thermostability determined as DSC Td at pH 4.0 as described in Example 15 of WO2018/098381 in the range between 70° C. and 95° C., such as between 80° C. and 90° C.

[0165] In one embodiment, the glucoamylase, such as a Penicillium oxalicum glucoamylase variant, has a thermostability determined as DSC Td at pH 4.8 as described in Example 15 of WO2018/098381 of at least 70° C., preferably at least 75° C., such as at least 80° C., such as at least 81° C., such as at least 82° C., such as at least 83° C., such as at least 84° C., such as at least 85° C., such as at least 86° C., such as at least 87%, such as at least 88° C., such as at least 89° C., such as at least 90° C., such as at least 91° C. In one embodiment, the glucoamylase, such as a Penicillium oxalicum glucoamylase variant, has a thermostability determined as DSC Td at pH 4.8 as described in Example 15 of WO2018/098381 in the range between 70° C. and 95° C., such as between 80° C. and 90° C.

[0166] In one embodiment, the glucoamylase, such as a Penicillium oxalicum glucoamylase variant, has a residual activity determined as described in Example 16 of WO2018/098381, of at least 100% such as at least 105%, such as at least 110%, such as at least 115%, such as at least 120%, such as at least 125%. In one embodiment, the glucoamylase, such as a Penicillium oxalicum glucoamylase variant, has a thermostability determined as residual activity as described in Example 16 of WO2018/098381, in the range between 100% and 130%.

[0167] In one embodiment, the glucoamylase, e.g., of fungal origin such as a filamentous fungi, from a strain of the genus Penicillium, e.g., a strain of Penicillium oxalicum, in particular the Penicillium oxalicum glucoamylase disclosed as SEQ ID NO: 2 in WO2011/127802 (which is hereby incorporated by reference).

[0168] In one embodiment, the glucoamylase has a mature polypeptide sequence of at least 80%, e.g., at least 85%, at least 90%, at least 91%, at least 92%, at least 93%, at least 94%, at least 95%, at least 96%, at least 97%, at least 98%, at least 99% or 100% identity to the mature polypeptide shown in SEQ ID NO: 2 in WO2011/127802.

[0169] In one embodiment, the glucoamylase is a variant of the Penicillium oxalicum glucoamylase disclosed as SEQ ID NO: 2 in WO2011/127802, having a K79V substitution. The K79V glucoamylase variant has reduced sensitivity to protease degradation relative to the parent as disclosed in WO2013/036526 (which is hereby incorporated by reference).

[0170] In one embodiment, the glucoamylase is derived from Penicillium oxalicum.

[0171] In one embodiment, the glucoamylase is a variant of the Penicillium oxalicum glucoamylase disclosed as SEQ ID NO: 2 in WO2011/127802. In one embodiment, the Penicillium oxalicum glucoamylase is the one disclosed as SEQ ID NO: 2 in WO2011/127802 having Val (V) in position 79.

[0172] Contemplated Penicillium oxalicum glucoamylase variants are disclosed in WO2013/053801 which is hereby incorporated by reference.

[0173] In one embodiment, these variants have reduced sensitivity to protease degradation.

[0174] In one embodiment, these variants have improved thermostability compared to the parent.

[0175] In one embodiment, the glucoamylase has a K79V substitution (using SEQ ID NO: 2 of WO2011/127802 for numbering), corresponding to the PE001 variant, and further comprises one of the following alterations or combinations of alterations

[0176] T65A; Q327F; E501V; Y504T; Y504*; T65A+Q327F; T65A+E501V; T65A+Y504T; T65A+Y504*; Q327F+E501V; Q327F+Y504T; Q327F+Y504*; E501V+Y504T; E501V+Y504*; T65A+Q327F+E501V; T65A+Q327F+Y504T; T65A+E501V+Y504T; Q327F+E501V+Y504T; T65A+Q327F+Y504*; T65A+E501V+Y504*; Q327F+E501V+Y504*; T65A+Q327F+E501V+Y504T; T65A+Q327F+E501V+Y504*; E501V+Y504T; T65A+K161S; T65A+Q405T; T65A+Q327W; T65A+Q327F; T65A+Q327Y; P11F+T65A+Q327F; R1K+D3W+K5Q+G7V+N8S+T10K+P11S+T65A+Q327F; P2N+P4S+P11F+T65A+Q327F; P11F+D26C+K33C+T65A+Q327F; P2N+P4S+P11F+T65A+Q327W+E501V+Y504T; R1E+D3N+P4G+G6R+G7A+N8A+T10D+P11D+T65A+Q327F; P11F+T65A+Q327W; P2N+P4S+P11F+T65A+Q327F+E501V+Y504T; P11F+T65A+Q327W+E501V+Y504T; T65A+Q327F+E501V+Y504T; T65A+S105P+Q327W; T65A+S105P+Q327F; T65A+Q327W+S364P; T65A+Q327F+S364P; T65A+S103N+Q327F; P2N+P4S+P11F+K34Y+T65A+Q327F; P2N+P4S+P11F+T65A+Q327F+D445N+V447S; P2N+P4S+P11F+T65A+I172V+Q327F; P2N+P4S+P11F+T65A+Q327F+N502*; P2N+P4S+P11F+T65A+Q327F+N502T+P563S+K571E; P2N+P4S+P11F+R31S+K33V+T65A+Q327F+N564D+K571S; P2N+P4S+P11F+T65A+Q327F+S377T; P2N+P4S+P11F+T65A+V325T+Q327W; P2N+P4S+P11F+T65A+Q327F+D445N+V447S+E501V+Y504T; P2N+P4S+P11F+T65A+I172V+Q327F+E501V+Y504T; P2N+P4S+P11F+T65A+Q327F+S377T+E501V+Y504T; P2N+P4S+P11F+D26N+K34Y+T65A+Q327F; P2N+P4S+P11F+T65A+Q327F+I375A+E501V+Y504T; P2N+P4S+P11F+T65A+K218A+K221D+Q327F+E501V+Y504T; P2N+P4S+P11F+T65A+S103N+Q327F+E501V+Y504T; P2N+P4S+T10D+T65A+Q327F+E501V+Y504T; P2N+P4S+F12Y+T65A+Q327F+E501V+Y504T; K5A+P11F+T65A+Q327F+E501V+Y504T; P2N+P4S+T10E+E18N+T65A+Q327F+E501V+Y504T; P2N+T10E+E18N+T65A+Q327F+E501V+Y504T; P2N+P4S+P11F+T65A+Q327F+E501V+Y504T+T568N; P2N+P4S+P11F+T65A+Q327F+E501V+Y504T+K524T+G526A; P2N+P4S+P11F+K34Y+T65A+Q327F+D445N+V447S+E501V+Y504T; P2N+P4S+P11F+R31S+K33V+T65A+Q327F+D445N+V447S+E501V+Y504T; P2N+P4S+P11F+D26N+K34Y+T65A+Q327F+E501V+Y504T; P2N+P4S+P11F+T65A+F80*+Q327F+E501V+Y504T; P2N+P4S+P11F+T65A+K112S+Q327F+E501V+Y504T; P2N+P4S+P11F+T65A+Q327F+E501V +Y504T+T516P+K524T+G526A; P2N+P4S+P11F+T65A+Q327F+E501V+N502T+Y504*; P2N+P4S+P11F+T65A+Q327F+E501V+Y504T; P2N+P4S+P11F+T65A+S103N+Q327F+E501V+Y504T; K5A+P11F+T65A+Q327F+E501V+Y504T; P2N+P4S+P11F+T65A+Q327F+E501V+Y504T+T516P+K524T+G526A; P2N+P4S+P11F+T65A+V79A+Q327F+E501V+Y504T; P2N+P4S+P11F+T65A+V79G+Q327F+E501V+Y504T; P2N+P4S+P11F+T65A+V79I+Q327F+E501V+Y504T; P2N+P4S+P11F+T65A+V79L+Q327F+E501V+Y504T; P2N+P4S+P11F+T65A+V79S+Q327F+E501V+Y504T; P2N+P4S+P11F+T65A+L72V+Q327F+E501V+Y504T; S255N+Q327F+E501V+Y504T; P2N+P4S+P11F+T65A+E74N+V79K+Q327F+E501V+Y504T; P2N+P4S+P11F+T65A+G220N+Q327F+E501V+Y504T; P2N+P4S+P11F+T65A+Y245N+Q327F+E501V+Y504T; P2N+P4S+P11F+T65A+Q253N+Q327F+E501V+Y504T; P2N+P4S+P11F+T65A+D279N+Q327F+E501V+Y504T; P2N+P4S+P11F+T65A+Q327F+S359N+E501V+Y504T; P2N+P4S+P11F+T65A+Q327F+D370N+E501V+Y504T; P2N+P4S+P11F+T65A+Q327F+V460S+E501V+Y504T; P2N+P4S+P11F+T65A+Q327F+V460T+P468T+E501V+Y504T; P2N+P4S+P11F+T65A+Q327F+T463N+E501V+Y504T; P2N+P4S+P11F+T65A+Q327F+S465N+E501V+Y504T; and P2N+P4S+P11F+T65A+Q327F+T477N+E501V+Y504T.

[0177] In one embodiment, the Penicillium oxalicum glucoamylase variant has a K79V substitution (using SEQ ID NO: 2 of WO2011/127802 for numbering), corresponding to the PE001 variant, and further comprises one of the following substitutions or combinations of substitutions:

[0178] P11F+T65A+Q327F;

[0179] P2N+P4S+P11F+T65A+Q327F;

[0180] P11F+D26C+K33C+T65A+Q327F;

[0181] P2N+P4S+P11F+T65A+Q327W+E501V+Y504T;

[0182] P2N+P4S+P11F+T65A+Q327F+E501V+Y504T; and

[0183] P11F+T65A+Q327W+E501V+Y504T.

[0184] Additional glucoamylases contemplated for use with the present invention can be found in WO2011/153516 (the content of which is incorporated herein).

[0185] Additional polynucleotides encoding suitable glucoamylases may be obtained from microorganisms of any genus, including those readily available within the UniProtKB database (www.uniprot.org).

[0186] It will be understood that for the aforementioned species, the invention encompasses both the perfect and imperfect states, and other taxonomic equivalents, e.g., anamorphs, regardless of the species name by which they are known. Those skilled in the art will readily recognize the identity of appropriate equivalents.

[0187] Strains of these species are readily accessible to the public in a number of culture collections, such as the American Type Culture Collection (ATCC), Deutsche Sammlung von Mikroorganismen and Zellkulturen GmbH (DSMZ), Centraalbureau Voor Schimmelcultures (CBS), and Agricultural Research Service Patent Culture Collection, Northern Regional Research Center (NRRL).

[0188] The glucoamylase coding sequences described or referenced herein, or a subsequence thereof, as well as the glucoamylases described or referenced herein, or a fragment thereof, may be used to design nucleic acid probes to identify and clone DNA encoding a glucoamylase from strains of different genera or species according to methods well known in the art. In particular, such probes can be used for hybridization with the genomic DNA or cDNA of a cell of interest, following standard Southern blotting procedures, in order to identify and isolate the corresponding gene therein. Such probes can be considerably shorter than the entire sequence, but should be at least 15, e.g., at least 25, at least 35, or at least 70 nucleotides in length. Preferably, the nucleic acid probe is at least 100 nucleotides in length, e.g., at least 200 nucleotides, at least 300 nucleotides, at least 400 nucleotides, at least 500 nucleotides, at least 600 nucleotides, at least 700 nucleotides, at least 800 nucleotides, or at least 900 nucleotides in length. Both DNA and RNA probes can be used. The probes are typically labeled for detecting the corresponding gene (for example, with ³²P, ³H, ³⁵S, biotin, or avidin).

[0189] A genomic DNA or cDNA library prepared from such other strains may be screened for DNA that hybridizes with the probes described above and encodes a parent. Genomic or other DNA from such other strains may be separated by agarose or polyacrylamide gel electrophoresis, or other separation techniques. DNA from the libraries or the separated DNA may be transferred to and immobilized on nitrocellulose or other suitable carrier material. In order to identify a clone or DNA that hybridizes with a coding sequence, or a subsequence thereof, the carrier material is used in a Southern blot.

[0190] In one embodiment, the nucleic acid probe is a polynucleotide, or subsequence thereof, that encodes the glucoamylase of any one of SEQ ID NOs: 8, 102-113, 229 and 230 or a fragment thereof.

[0191] For purposes of the probes described above, hybridization indicates that the polynucleotide hybridizes to a labeled nucleic acid probe, or the full-length complementary strand thereof, or a subsequence of the foregoing; under very low to very high stringency conditions. Molecules to which the nucleic acid probe hybridizes under these conditions can be detected using, for example, X-ray film. Stringency and washing conditions are defined as described supra.

[0192] In one embodiment, the glucoamylase is encoded by a polynucleotide that hybridizes under at least low stringency conditions, e.g., medium stringency conditions, medium-high stringency conditions, high stringency conditions, or very high stringency conditions with the full-length complementary strand of the coding sequence for any one of the glucoamylases described or referenced herein (e.g., the coding sequence that encodes any one of SEQ ID NOs: 8, 102-113, 229 and 230). (Sambrook et al., 1989, Molecular Cloning, A Laboratory Manual, 2d edition, Cold Spring Harbor, N.Y.).

[0193] The glucoamylase may also be identified and obtained from other sources including microorganisms isolated from nature (e.g., soil, composts, water, silage, etc.) or DNA samples obtained directly from natural materials (e.g., soil, composts, water, silage, etc.) using the above-mentioned probes. Techniques for isolating microorganisms and DNA directly from natural habitats are well known in the art. The polynucleotide encoding a glucoamylase may then be derived by similarly screening a genomic or cDNA library of another microorganism or mixed DNA sample.

[0194] Once a polynucleotide encoding a glucoamylase has been detected with a suitable probe as described herein, the sequence may be isolated or cloned by utilizing techniques that are known to those of ordinary skill in the art (see, e.g., Sambrook et al., 1989, Molecular Cloning, A Laboratory Manual, 2d edition, Cold Spring Harbor, N.Y.). Techniques used to isolate or clone polynucleotides encoding glucoamylases include isolation from genomic DNA, preparation from cDNA, or a combination thereof. The cloning of the polynucleotides from such genomic DNA can be effected, e.g., by using the well-known polymerase chain reaction (PCR) or antibody screening of expression libraries to detect cloned DNA fragments with shares structural features. See, e.g., Innis et al., 1990, PCR: A Guide to Methods and Application, Academic Press, New York. Other nucleic acid amplification procedures such as ligase chain reaction (LCR), ligated activated transcription (LAT) and nucleotide sequence-based amplification (NASBA) may be used.

[0195] In one embodiment, the glucoamylase has a mature polypeptide sequence that comprises or consists of the amino acid sequence of any one of the glucoamylases described or referenced herein (e.g., any one of SEQ ID NOs: 8, 102-113, 229 and 230). In another embodiment, the glucoamylase has a mature polypeptide sequence that is a fragment of the any one of the glucoamylases described or referenced herein (e.g., any one of SEQ ID NOs: 8, 102-113, 229 and 230). In one embodiment, the number of amino acid residues in the fragment is at least 75%, e.g., at least 80%, 85%, 90%, or 95% of the number of amino acid residues in referenced full length glucoamylase (e.g. any one of SEQ ID NOs: 8, 102-113, 229 and 230). In other embodiments, the glucoamylase may comprise the catalytic domain of any glucoamylase described or referenced herein (e.g., the catalytic domain of any one of SEQ ID NOs: 8, 102-113, 229 and 230).

[0196] The glucoamylase may be a variant of any one of the glucoamylases described supra (e.g., any one of SEQ ID NOs: 8, 102-113, 229 and 230). In one embodiment, the glucoamylase has a mature polypeptide sequence of at least 60%, e.g., at least 65%, 70%, 75%, 80%, 85%, 90%, 95%, 97%, 98%, 99%, or 100% sequence identity to any one of the glucoamylases described supra (e.g., any one of SEQ ID NOs: 8, 102-113, 229 and 230).

[0197] In one embodiment, the glucoamylase has a mature polypeptide sequence that differs by no more than ten amino acids, e.g., by no more than five amino acids, by no more than four amino acids, by no more than three amino acids, by no more than two amino acids, or by one amino acid from the amino acid sequence of any one of the glucoamylases described supra (e.g., any one of SEQ ID NOs: 8, 102-113, 229 and 230). In one embodiment, the glucoamylase has an amino acid substitution, deletion, and/or insertion of one or more (e.g., two, several) of amino acid sequence of any one of the glucoamylases described supra (e.g., any one of SEQ ID NOs: 8, 102-113, 229 and 230). In some embodiments, the total number of amino acid substitutions, deletions and/or insertions is not more than 10, e.g., not more than 9, 8, 7, 6, 5, 4, 3, 2, or 1.

[0198] The amino acid changes are generally of a minor nature, that is conservative amino acid substitutions or insertions that do not significantly affect the folding and/or activity of the protein; small deletions, typically of one to about 30 amino acids; small amino-terminal or carboxyl-terminal extensions, such as an amino-terminal methionine residue; a small linker peptide of up to about 20-25 residues; or a small extension that facilitates purification by changing net charge or another function, such as a poly-histidine tract, an antigenic epitope or a binding domain.

[0199] Examples of conservative substitutions are within the group of basic amino acids (arginine, lysine and histidine), acidic amino acids (glutamic acid and aspartic acid), polar amino acids (glutamine and asparagine), hydrophobic amino acids (leucine, isoleucine and valine), aromatic amino acids (phenylalanine, tryptophan and tyrosine), and small amino acids (glycine, alanine, serine, threonine and methionine). Amino acid substitutions that do not generally alter specific activity are known in the art and are described, for example, by H. Neurath and R. L. Hill, 1979, In, The Proteins, Academic Press, New York. The most commonly occurring exchanges are Ala/Ser, Val/Ile, Asp/Glu, Thr/Ser, Ala/Gly, Ala/Thr, Ser/Asn, Ala/Val, Ser/Gly, Tyr/Phe, Ala/Pro, Lys/Arg, Asp/Asn, Leu/Ile, Leu/Val, Ala/Glu, and Asp/Gly.

[0200] Alternatively, the amino acid changes are of such a nature that the physico-chemical properties of the polypeptides are altered. For example, amino acid changes may improve the thermal stability of the glucoamylase, alter the substrate specificity, change the pH optimum, and the like.

[0201] Essential amino acids can be identified according to procedures known in the art, such as site-directed mutagenesis or alanine-scanning mutagenesis (Cunningham and Wells, 1989, Science 244: 1081-1085). In the latter technique, single alanine mutations are introduced at every residue in the molecule, and the resultant mutant molecules are tested for activity to identify amino acid residues that are critical to the activity of the molecule. See also, Hilton et al., 1996, J. Biol. Chem. 271: 4699-4708. The active site or other biological interaction can also be determined by physical analysis of structure, as determined by such techniques as nuclear magnetic resonance, crystallography, electron diffraction, or photoaffinity labeling, in conjunction with mutation of putative contact site amino acids. See, for example, de Vos et al., 1992, Science 255: 306-312; Smith et al., 1992, J. Mol. Biol. 224: 899-904; Wlodaver et al., 1992, FEBS Lett. 309: 59-64. The identities of essential amino acids can also be inferred from analysis of identities with other glucoamylases that are related to the referenced glucoamylase.

[0202] Additional guidance on the structure-activity relationship of the polypeptides herein can be determined using multiple sequence alignment (MSA) techniques well-known in the art. Based on the teachings herein, the skilled artisan could make similar alignments with any number of glucoamylases described herein or known in the art. Such alignments aid the skilled artisan to determine potentially relevant domains (e.g., binding domains or catalytic domains), as well as which amino acid residues are conserved and not conserved among the different glucoamylase sequences. It is appreciated in the art that changing an amino acid that is conserved at a particular position between disclosed polypeptides will more likely result in a change in biological activity (Bowie et al., 1990, Science 247: 1306-1310: “Residues that are directly involved in protein functions such as binding or catalysis will certainly be among the most conserved”). In contrast, substituting an amino acid that is not highly conserved among the polypeptides will not likely or significantly alter the biological activity.

[0203] Even further guidance on the structure-activity relationship for the skilled artisan can be found in published x-ray crystallography studies known in the art.

[0204] Single or multiple amino acid substitutions, deletions, and/or insertions can be made and tested using known methods of mutagenesis, recombination, and/or shuffling, followed by a relevant screening procedure, such as those disclosed by Reidhaar-Olson and Sauer, 1988, Science 241: 53-57; Bowie and Sauer, 1989, Proc. Natl. Acad. Sci. USA 86: 2152-2156; WO95/17413; or WO95/22625. Other methods that can be used include error-prone PCR, phage display (e.g., Lowman et al., 1991, Biochemistry 30: 10832-10837; U.S. Pat. No. 5,223,409; WO92/06204), and region-directed mutagenesis (Derbyshire et al., 1986, Gene 46: 145; Ner et al., 1988, DNA 7: 127).

[0205] Mutagenesis/shuffling methods can be combined with high-throughput, automated screening methods to detect activity of cloned, mutagenized polypeptides expressed by host cells (Ness et al., 1999, Nature Biotechnology 17: 893-896). Mutagenized DNA molecules that encode active alpha-amylases can be recovered from the host cells and rapidly sequenced using standard methods in the art. These methods allow the rapid determination of the importance of individual amino acid residues in a polypeptide.

[0206] In some embodiments, the glucoamylase has at least 20%, e.g., at least 40%, at least 50%, at least 60%, at least 70%, at least 80%, at least 90%, at least 95%, at least 96%, at least 97%, at least 98%, at least 99%, or 100% of the glucoamylase activity of any glucoamylase described or referenced herein (e.g., any one of SEQ ID NOs: 8, 102-113, 229 and 230) under the same conditions.

[0207] In one embodiment, the glucoamylase coding sequence hybridizes under at least low stringency conditions, e.g., medium stringency conditions, medium-high stringency conditions, high stringency conditions, or very high stringency conditions with the full-length complementary strand of the coding sequence from any glucoamylase described or referenced herein (e.g., any one of SEQ ID NOs: 8, 102-113, 229 and 230). In one embodiment, the glucoamylase coding sequence has at least 65%, e.g., at least 70%, at least 75%, at least 80%, at least 85%, at least 85%, at least 90%, at least 91%, at least 92%, at least 93%, at least 94%, at least 95%, at least 96%, at least 97%, at least 98%, at least 99%, or 100% sequence identity with the coding sequence from any glucoamylase described or referenced herein (e.g., any one of SEQ ID NOs: 8, 102-113, 229 and 230).

[0208] In one embodiment, the glucoamylase comprises the coding sequence of any glucoamylase described or referenced herein (any one of SEQ ID NOs: 8, 102-113, 229 and 230). In one embodiment, the glucoamylase comprises a coding sequence that is a subsequence of the coding sequence from any glucoamylase described or referenced herein, wherein the subsequence encodes a polypeptide having glucoamylase activity. In one embodiment, the number of nucleotides residues in the subsequence is at least 75%, e.g., at least 80%, 85%, 90%, or 95% of the number of the referenced coding sequence.

[0209] The referenced glucoamylase coding sequence of any related aspect or embodiment described herein can be the native coding sequence or a degenerate sequence, such as a codon-optimized coding sequence designed for use in a particular host cell (e.g., optimized for expression in Saccharomyces cerevisiae).

[0210] The glucoamylase may be a fused polypeptide or cleavable fusion polypeptide in which another polypeptide is fused at the N-terminus or the C-terminus of the glucoamylase. A fused polypeptide may be produced by fusing a polynucleotide encoding another polypeptide to a polynucleotide encoding the glucoamylase. Techniques for producing fusion polypeptides are known in the art, and include ligating the coding sequences encoding the polypeptides so that they are in frame and that expression of the fused polypeptide is under control of the same promoter(s) and terminator. Fusion proteins may also be constructed using intein technology in which fusions are created post-translationally (Cooper et al., 1993, EMBO J. 12: 2575-2583; Dawson et al., 1994, Science 266: 776-779).

### Alpha-Amylases

[0211] The host cells and fermenting organisms may express a heterologous alpha-amylase (e.g., as a fusion protein of the invention). The alpha-amylase may be any alpha-amylase that is suitable for the host cells and/or the methods described herein, such as a naturally occurring alpha-amylase (e.g., a native alpha-amylase from another species or an endogenous alpha-amylase expressed from a modified expression vector) or a variant thereof that retains alpha-amylase activity. Any alpha-amylase contemplated for expression by a host cell or fermenting organism described below is also contemplated for embodiments of the invention involving exogenous addition of an alpha-amylase.

[0212] In some embodiments, the host cell or fermenting organism comprises a heterologous polynucleotide encoding an alpha-amylase, for example, as described in WO2017/087330 or WO2020/023411, the content of which is hereby incorporated by reference. Any alpha-amylase described or referenced herein is contemplated for expression in the host cell or fermenting organism.

[0213] In some embodiments, the host cell or fermenting organism comprising a heterologous polynucleotide encoding an alpha-amylase has an increased level of alpha-amylase activity compared to the host cells without the heterologous polynucleotide encoding the alpha-amylase, when cultivated under the same conditions. In some embodiments, the host cell or fermenting organism has an increased level of alpha-amylase activity of at least 5%, e.g., at least 10%, at least 15%, at least 20%, at least 25%, at least 50%, at least 100%, at least 150%, at least 200%, at least 300%, or at 500% compared to the host cell or fermenting organism without the heterologous polynucleotide encoding the alpha-amylase, when cultivated under the same conditions (e.g., as described in Example 2).

[0214] Exemplary alpha-amylases that can be used with the host cells and/or the methods described herein include bacterial, yeast, or filamentous fungal alpha-amylases, e.g., derived from any of the microorganisms described or referenced herein.

[0215] The term “bacterial alpha-amylase” means any bacterial alpha-amylase classified under EC 3.2.1.1. A bacterial alpha-amylase used herein may, e.g., be derived from a strain of the genus Bacillus, which is sometimes also referred to as the genus Geobacillus. In one embodiment, the Bacillus alpha-amylase is derived from a strain of Bacillus amyloliquefaciens, Bacillus licheniformis, Bacillus stearothermophilus, or Bacillus subtilis, but may also be derived from other Bacillus sp.

[0216] Specific examples of bacterial alpha-amylases include the Bacillus stearothermophilus alpha-amylase (BSG) of SEQ ID NO: 3 in WO99/19467, the Bacillus amyloliquefaciens alpha-amylase (BAN) of SEQ ID NO: 5 in WO99/19467, and the Bacillus licheniformis alpha-amylase (BLA) of SEQ ID NO: 4 in WO99/19467 (all sequences are hereby incorporated by reference). In one embodiment, the alpha-amylase may be an enzyme having a mature polypeptide sequence with a degree of identity of at least 60%, e.g., at least 70%, at least 80%, at least 90%, at least 95%, at least 96%, at least 97%, at least 98% or at least 99% to any of the sequences shown in SEQ ID NOs: 3, 4 or 5, in WO99/19467.

[0217] In one embodiment, the alpha-amylase is derived from Bacillus stearothermophilus. The Bacillus stearothermophilus alpha-amylase may be a mature wild-type or a mature variant thereof. The mature Bacillus stearothermophilus alpha-amylases may naturally be truncated during recombinant production. For instance, the Bacillus stearothermophilus alpha-amylase may be a truncated at the C-terminal, so that it is from 480-495 amino acids long, such as about 491 amino acids long, e.g., so that it lacks a functional starch binding domain (compared to SEQ ID NO: 3 in WO99/19467).

[0218] The Bacillus alpha-amylase may also be a variant and/or hybrid. Examples of such a variant can be found in any of WO96/23873, WO96/23874, WO97/41213, WO99/19467, WO00/60059, and WO02/10355 (each hereby incorporated by reference). Specific alpha-amylase variants are disclosed in U.S. Pat. Nos. 6,093,562, 6,187,576, 6,297,038, and 7,713,723 (hereby incorporated by reference) and include Bacillus stearothermophilus alpha-amylase (often referred to as BSG alpha-amylase) variants having a deletion of one or two amino acids at positions R179, G180, I181 and/or G182, preferably a double deletion disclosed in WO96/23873 — see, e.g., page 20, lines 1-10 (hereby incorporated by reference), such as corresponding to deletion of positions I181 and G182 compared to the amino acid sequence of Bacillus stearothermophilus alpha-amylase set forth in SEQ ID NO: 3 disclosed in WO99/19467 or the deletion of amino acids R179 and G180 using SEQ ID NO: 3 in WO99/19467 for numbering (which reference is hereby incorporated by reference). In some embodiments, the Bacillus alpha-amylases, such as Bacillus stearothermophilus alpha-amylases, have a double deletion corresponding to a deletion of positions 181 and 182 and further optionally comprise a N193F substitution (also denoted I181*+G182*+N193F) compared to the wild-type BSG alpha-amylase amino acid sequence set forth in SEQ ID NO: 3 disclosed in WO99/19467. The bacterial alpha-amylase may also have a substitution in a position corresponding to S239 in the Bacillus licheniformis alpha-amylase shown in SEQ ID NO: 4 in WO99/19467, or a S242 and/or E188P variant of the Bacillus stearothermophilus alpha-amylase of SEQ ID NO: 3 in WO99/19467.

[0219] In one embodiment, the variant is a S242A, E or Q variant, e.g., a S242Q variant, of the Bacillus stearothermophilus alpha-amylase.

[0220] In one embodiment, the variant is a position E188 variant, e.g., E188P variant of the Bacillus stearothermophilus alpha-amylase.

[0221] The bacterial alpha-amylase may, in one embodiment, be a truncated Bacillus alpha-amylase. In one embodiment, the truncation is so that, e.g., the Bacillus stearothermophilus alpha-amylase shown in SEQ ID NO: 3 in WO99/19467, is about 491 amino acids long, such as from 480 to 495 amino acids long, or so it lacks a functional starch bind domain.

[0222] The bacterial alpha-amylase may also be a hybrid bacterial alpha-amylase, e.g., an alpha-amylase comprising 445 C-terminal amino acid residues of the Bacillus licheniformis alpha-amylase (shown in SEQ ID NO: 4 of WO99/19467) and the 37 N-terminal amino acid residues of the alpha-amylase derived from Bacillus amyloliquefaciens (shown in SEQ ID NO: 5 of WO99/19467). In one embodiment, this hybrid has one or more, especially all, of the following substitutions: G48A+T49I+G 107A+H156Y+A181T+N 190F+I201F+A209V+Q264S (using the Bacillus licheniformis numbering in SEQ ID NO: 4 of WO99/19467). In some embodiments, the variants have one or more of the following mutations (or corresponding mutations in other Bacillus alpha-amylases): H154Y, A181T, N190F, A209V and Q264S and/or the deletion of two residues between positions 176 and 179, e.g., deletion of E178 and G179 (using SEQ ID NO: 5 of WO99/19467 for position numbering).

[0223] In one embodiment, the bacterial alpha-amylase is the mature part of the chimeric alpha-amylase disclosed in Richardson et al. (2002), The Journal of Biological Chemistry, Vol. 277, No 29, Issue 19 July, pp. 267501-26507, referred to as BD5088 or a variant thereof. This alpha-amylase is the same as the one shown in SEQ ID NO: 2 in WO2007/134207. The mature enzyme sequence starts after the initial “Met” amino acid in position 1.

[0224] The alpha-amylase may be a thermostable alpha-amylase, such as a thermostable bacterial alpha-amylase, e.g., from Bacillus stearothermophilus. In one embodiment, the alpha-amylase used in a process described herein has a T½ (min) at pH 4.5, 85° C., 0.12 mM CaCl₂ of at least 10 determined as described in Example 1 of WO2018/098381.

[0225] In one embodiment, the thermostable alpha-amylase has a T½ (min) at pH 4.5, 85° C., 0.12 mM CaCl₂, of at least 15. In one embodiment, the thermostable alpha-amylase has a T½ (min) at pH 4.5, 85° C., 0.12 mM CaCl₂, of as at least 20. In one embodiment, the thermostable alpha-amylase has a T½ (min) at pH 4.5, 85° C., 0.12 mM CaCl₂, of as at least 25. In one embodiment, the thermostable alpha-amylase has a T½ (min) at pH 4.5, 85° C., 0.12 mM CaCl₂, of as at least 30. In one embodiment, the thermostable alpha-amylase has a T½ (min) at pH 4.5, 85° C., 0.12 mM CaCl₂, of as at least 40.

[0226] In one embodiment, the thermostable alpha-amylase has a T½ (min) at pH 4.5, 85° C., 0.12 mM CaCl₂, of at least 50. In one embodiment, the thermostable alpha-amylase has a T½ (min) at pH 4.5, 85° C., 0.12 mM CaCl₂, of at least 60. In one embodiment, the thermostable alpha-amylase has a T½ (min) at pH 4.5, 85° C., 0.12 mM CaCl₂, between 10-70. In one embodiment, the thermostable alpha-amylase has a T½ (min) at pH 4.5, 85° C., 0.12 mM CaCl₂, between 15-70. In one embodiment, the thermostable alpha-amylase has a T½ (min) at pH 4.5, 85° C., 0.12 mM CaCl₂, between 20-70. In one embodiment, the thermostable alpha-amylase has a T½ (min) at pH 4.5, 85° C., 0.12 mM CaCl₂, between 25-70. In one embodiment, the thermostable alpha-amylase has a T½ (min) at pH 4.5, 85° C., 0.12 mM CaCl₂, between 30-70. In one embodiment, the thermostable alpha-amylase has a T½ (min) at pH 4.5, 85° C., 0.12 mM CaCl₂, between 40-70. In one embodiment, the thermostable alpha-amylase has a T½ (min) at pH 4.5, 85° C., 0.12 mM CaCl₂, between 50-70. In one embodiment, the thermostable alpha-amylase has a T½ (min) at pH 4.5, 85° C., 0.12 mM CaCl₂, between 60-70.

[0227] In one embodiment, the alpha-amylase is a bacterial alpha-amylase, e.g., derived from the genus Bacillus, such as a strain of Bacillus stearothermophilus, e.g., the Bacillus stearothermophilus as disclosed in WO99/019467 as SEQ ID NO: 3 with one or two amino acids deleted at positions R179, G180, I181 and/or G182, in particular with R179 and G180 deleted, or with I181 and G182 deleted, with mutations in below list of mutations.

[0228] In some embodiment, the Bacillus stearothermophilus alpha-amylases have double deletion I181+G182, and optional substitution N193F, further comprising one of the following substitutions or combinations of substitutions:

[0229] V59A+Q89R+G112D+E129V+K177L+R179E+K220P+N224L+Q254S;

[0230] V59A+Q89R+E129V+K177L+R179E+H208Y+K220P+N224L+Q254S;

[0231] V59A+Q89R+E129V+K177L+R179E+K220P+N224L+Q254S+D269E+D281N;

[0232] V59A+Q89R+E129V+K177L+R179E+K220P+N224L+Q254S+I270L;

[0233] V59A+Q89R+E129V+K177L+R179E+K220P+N224L+Q254S+H274K;

[0234] V59A+Q89R+E129V+K177L+R179E+K220P+N224L+Q254S+Y276F;

[0235] V59A+E129V+R157Y+K177L+R179E+K220P+N224L+S242Q+Q254S;

[0236] V59A+E129V+K177L+R179E+H208Y+K220P+N224L+S242Q+Q254S;

[0237] V59A+E129V+K177L+R179E+K220P+N224L+S242Q+Q254S;

[0238] V59A+E129V+K177L+R179E+K220P+N224L+S242Q+Q254S+H274K;

[0239] V59A+E129V+K177L+R179E+K220P+N224L+S242Q+Q254S+Y276F;

[0240] V59A+E129V+K177L+R179E+K220P+N224L+S242Q+Q254S+D281N;

[0241] V59A+E129V+K177L+R179E+K220P+N224L+S242Q+Q254S+M284T;

[0242] V59A+E129V+K177L+R179E+K220P+N224L+S242Q+Q254S+G416V;

[0243] V59A+E129V+K177L+R179E+K220P+N224L+Q254S;

[0244] V59A+E129V+K177L+R179E+K220P+N224L+Q254S+M284T;

[0245] A91L+M96I+E129V+K177L+R179E+K220P+N224L+S242Q+Q254S;

[0246] E129V+K177L+R179E;

[0247] E129V+K177L+R179E+K220P+N224L+S242Q+Q254S;

[0248] E129V+K177L+R179E+K220P+N224L+S242Q+Q254S+Y276F+L427M;

[0249] E129V+K177L+R179E+K220P+N224L+S242Q+Q254S+M284T;

[0250] E129V+K177L+R179E+K220P+N224L+S242Q+Q254S+N376*I377*;

[0251] E129V+K177L+R179E+K220P+N224L+Q254S;

[0252] E129V+K177L+R179E+K220P+N224L+Q254S+M284T;

[0253] E129V+K177L+R179E+S242Q;

[0254] E129V+K177L+R179V+K220P+N224L+S242Q+Q254S;

[0255] K220P+N224L+S242Q+Q254S;

[0256] M284V;

[0257] V59A+Q89R+E129V+K177L+R179E+Q254S+M284V; and

[0258] V59A+E129V+K177L+R179E+Q254S+M284V;

[0259] In one embodiment, the alpha-amylase is selected from the group of Bacillus stearothermophilus alpha-amylase variants with double deletion I181*+G182*, and optionally substitution N193F, and further one of the following substitutions or combinations of substitutions:

[0260] E129V+K177L+R179E;

[0261] V59A+Q89R+E129V+K177L+R179E+H208Y+K220P+N224L+Q254S;

[0262] V59A+Q89R+E129V+K177L+R179E+Q254S+M284V;

[0263] V59A+E129V+K177L+R179E+Q254S+M284V; and

[0264] E129V+K177L+R179E+K220P+N224L+S242Q+Q254S (using SEQ ID NO: 1 herein for numbering).

[0265] It should be understood that when referring to Bacillus stearothermophilus alpha-amylase and variants thereof they are normally produced in truncated form. In particular, the truncation may be so that the Bacillus stearothermophilus alpha-amylase shown in SEQ ID NO: 3 in WO99/19467, or variants thereof, are truncated in the C-terminal and are typically from 480-495 amino acids long, such as about 491 amino acids long, e.g., so that it lacks a functional starch binding domain.

[0266] In one embodiment, the alpha-amylase variant may be an enzyme having a mature polypeptide sequence with a degree of identity of at least 60%, e.g., at least 70%, at least 80%, at least 90%, at least 95%, at least 91%, at least 92%, at least 93%, at least 94%, at least 95%, at least 96%, at least 97%, at least 98% or at least 99%, but less than 100% to the sequence shown in SEQ ID NO: 3 in WO99/19467.

[0267] In one embodiment, the bacterial alpha-amylase, e.g., Bacillus alpha-amylase, such as especially Bacillus stearothermophilus alpha-amylase, or variant thereof, is dosed to liquefaction in a concentration between 0.01-10 KNU-A/g DS, e.g., between 0.02 and 5 KNU-A/g DS, such as 0.03 and 3 KNU-A, preferably 0.04 and 2 KNU-A/g DS, such as especially 0.01 and 2 KNU-A/g DS. In one embodiment, the bacterial alpha-amylase, e.g., Bacillus alpha-amylase, such as especially Bacillus stearothermophilus alpha-amylases, or variant thereof, is dosed to liquefaction in a concentration of between 0.0001-1 mg EP (Enzyme Protein)/g DS, e.g., 0.0005-0.5 mg EP/g DS, such as 0.001-0.1 mg EP/g DS.

[0268] In one embodiment, the bacterial alpha-amylase is derived from the Bacillus subtilis alpha-amylase of SEQ ID NO: 76, the Bacillus subtilis alpha-amylase of SEQ ID NO: 82, the Bacillus subtilis alpha-amylase of SEQ ID NO: 83, the Bacillus subtilis alpha-amylase of SEQ ID NO: 84, or the Bacillus licheniformis alpha-amylase of SEQ ID NO: 85, the Clostridium phytofermentans alpha-amylase of SEQ ID NO: 89, the Clostridium phytofermentans alpha-amylase of SEQ ID NO: 90, the Clostridium phytofermentans alpha-amylase of SEQ ID NO: 91, the Clostridium phytofermentans alpha-amylase of SEQ ID NO: 92, the Clostridium phytofermentans alpha-amylase of SEQ ID NO: 93, the Clostridium phytofermentans alpha-amylase of SEQ ID NO: 94, the Clostridium thermocellum alpha-amylase of SEQ ID NO: 95, the Thermobifida fusca alpha-amylase of SEQ ID NO: 96, the Thermobifida fusca alpha-amylase of SEQ ID NO: 97, the Anaerocellum thermophilum of SEQ ID NO: 98, the Anaerocellum thermophilum of SEQ ID NO: 99, the Anaerocellum thermophilum of SEQ ID NO: 100, the Streptomyces avermitilis of SEQ ID NO: 101, or the Streptomyces avermitilis of SEQ ID NO: 88.

[0269] In one embodiment, the alpha-amylase is derived from Bacillus amyloliquefaciens, such as the Bacillus amyloliquefaciens alpha-amylase of SEQ ID NO: 231 (e.g., as described in WO2018/002360, or variants thereof as described in WO2017/037614).

[0270] In one embodiment, the alpha-amylase is derived from a yeast alpha-amylase, such as the Saccharomycopsis fibuligera alpha-amylase of SEQ ID NO: 77, the Debaryomyces occidentalis alpha-amylase of SEQ ID NO: 78, the Debaryomyces occidentalis alpha-amylase of SEQ ID NO: 79, the Lipomyces kononenkoae alpha-amylase of SEQ ID NO: 80, the Lipomyces kononenkoae alpha-amylase of SEQ ID NO: 81.

[0271] In one embodiment, the alpha-amylase is derived from a filamentous fungal alpha-amylase, such as the Aspergillus niger alpha-amylase of SEQ ID NO: 86, or the Aspergillus niger alpha-amylase of SEQ ID NO: 87.

[0272] Additional alpha-amylases that may be expressed with the host cells and fermenting organisms and used with the methods described herein are described in the examples, and include, but are not limited to alpha-amylases shown in Table 2 (or derivatives thereof).

TABLE 2

| Donor Organism | SEQ ID NO: |
|---|---|
| (catalytic domain) | (mature polypeptide) |
| Rhizomucor pusillus | 121 |
| Bacillus licheniformis | 122 |
| Aspergillus niger | 123 |
| Aspergillus tamarii | 124 |
| Acidomyces richmondensis | 125 |
| Aspergillus bombycis | 126 |
| Alternaria sp | 127 |
| Rhizopus microsporus | 128 |
| Syncephalastrum racemosum | 129 |
| Rhizomucor pusillus | 130 |
| Dichotomocladium hesseltinei | 131 |
| Lichtheimia ramosa | 132 |
| Penicillium aethiopicum | 133 |
| Subulispora sp | 134 |
| Trichoderma paraviridescens | 135 |
| Byssoascus striatosporus | 136 |
| Aspergillus brasiliensis | 137 |
| Penicillium subspinulosum | 138 |
| Penicillium antarcticum | 139 |
| Penicillium coprophilum | 140 |
| Penicillium olsonii | 141 |
| Penicillium vasconiae | 142 |
| Penicillium sp | 143 |
| Heterocephalum aurantiacum | 144 |
| Neosartorya massa | 145 |
| Penicillium janthinellum | 146 |
| Aspergillus brasiliensis | 147 |
| Aspergillus westerdijkiae | 148 |
| Hamigera avellanea | 149 |
| Hamigera avellanea | 150 |
| Meripilus giganteus | 151 |
| Cerrena unicolor | 152 |
| Physalacria cryptomeriae | 153 |
| Lenzites betulinus | 154 |
| Trametes ljubarskyi | 155 |
| Bacillus subtilis | 156 |
| Bacillus subtilis subsp. subtilis | 157 |
| Schwanniomyces occidentalis | 158 |
| Rhizomucor pusillus | 159 |
| Aspergillus niger | 160 |
| Bacillus stearothermophilus | 161 |
| Bacillus halmapalus | 162 |
| Aspergillus oryzae | 163 |
| Bacillus amyloliquefaciens | 164 |
| Rhizomucor pusillus | 165 |
| Kionochaeta ivoriensis | 166 |
| Aspergillus niger | 167 |
| Aspergillus oryzae | 168 |
| Penicillium canescens | 169 |
| Acidomyces acidothermus | 170 |
| Kinochaeta ivoriensis | 171 |
| Aspergillus terreus | 172 |
| Thamnidium elegans | 173 |
| Meripilus giganteus | 174 |

[0273] Additional alpha-amylases contemplated for use with the present invention can be found in WO2011/153516, WO2017/087330 and WO2020/023411 (the content of which is incorporated herein).

[0274] Additional polynucleotides encoding suitable alpha-amylases may be obtained from microorganisms of any genus, including those readily available within the UniProtKB database (www.uniprot.org).

[0275] The alpha-amylase coding sequences can also be used to design nucleic acid probes to identify and clone DNA encoding alpha-amylases from strains of different genera or species, as described supra.

[0276] The polynucleotides encoding alpha-amylases may also be identified and obtained from other sources including microorganisms isolated from nature (e.g., soil, composts, water, etc.) or DNA samples obtained directly from natural materials (e.g., soil, composts, water, etc.) as described supra.

[0277] Techniques used to isolate or clone polynucleotides encoding alpha-amylases are described supra.

[0278] In one embodiment, the alpha-amylase has a mature polypeptide sequence that comprises or consists of the amino acid sequence of any one of the alpha-amylases described or referenced herein (e.g., any one of SEQ ID NOs: 76-101, 121-174 and 231). In another embodiment, the alpha-amylase has a mature polypeptide sequence that is a fragment of the any one of the alpha-amylases described or referenced herein (e.g., any one of SEQ ID NOs: 76-101, 121-174 and 231). In one embodiment, the number of amino acid residues in the fragment is at least 75%, e.g., at least 80%, 85%, 90%, or 95% of the number of amino acid residues in referenced full length alpha-amylase (e.g. any one of SEQ ID NOs: 76-101, 121-174 and 231). In other embodiments, the alpha-amylase may comprise the catalytic domain of any alpha-amylase described or referenced herein (e.g., the catalytic domain of any one of SEQ ID NOs: 76-101, 121-174 and 231).

[0279] The alpha-amylase may be a variant of any one of the alpha-amylases described supra (e.g., any one of SEQ ID NOs: 76-101, 121-174 and 231). In one embodiment, the alpha-amylase has a mature polypeptide sequence of at least 60%, e.g., at least 65%, 70%, 75%, 80%, 85%, 90%, 95%, 97%, 98%, 99%, or 100% sequence identity to any one of the alpha-amylases described supra (e.g., any one of SEQ ID NOs: 76-101, 121-174 and 231).

[0280] Examples of suitable amino acid changes, such as conservative substitutions that do not significantly affect the folding and/or activity of the alpha-amylase, are described herein.

[0281] In one embodiment, the alpha-amylase has a mature polypeptide sequence that differs by no more than ten amino acids, e.g., by no more than five amino acids, by no more than four amino acids, by no more than three amino acids, by no more than two amino acids, or by one amino acid from the amino acid sequence of any one of the alpha-amylases described supra (e.g., any one of SEQ ID NOs: 76-101, 121-174 and 231). In one embodiment, the alpha-amylase has an amino acid substitution, deletion, and/or insertion of one or more (e.g., two, several) of amino acid sequence of any one of the alpha-amylases described supra (e.g., any one of SEQ ID NOs: 76-101, 121-174 and 231). In some embodiments, the total number of amino acid substitutions, deletions and/or insertions is not more than 10, e.g., not more than 9, 8, 7, 6, 5, 4, 3, 2, or 1.

[0282] In some embodiments, the alpha-amylase has at least 20%, e.g., at least 40%, at least 50%, at least 60%, at least 70%, at least 80%, at least 90%, at least 95%, at least 96%, at least 97%, at least 98%, at least 99%, or 100% of the alpha-amylase activity of any alpha-amylase described or referenced herein (e.g., any one of SEQ ID NOs: 76-101, 121-174 and 231) under the same conditions.

[0283] In one embodiment, the alpha-amylase coding sequence hybridizes under at least low stringency conditions, e.g., medium stringency conditions, medium-high stringency conditions, high stringency conditions, or very high stringency conditions with the full-length complementary strand of the coding sequence from any alpha-amylase described or referenced herein (e.g., any one of SEQ ID NOs: 76-101, 121-174 and 231). In one embodiment, the alpha-amylase coding sequence has at least 65%, e.g., at least 70%, at least 75%, at least 80%, at least 85%, at least 85%, at least 90%, at least 91%, at least 92%, at least 93%, at least 94%, at least 95%, at least 96%, at least 97%, at least 98%, at least 99%, or 100% sequence identity with the coding sequence from any alpha-amylase described or referenced herein (e.g., any one of SEQ ID NOs: 76-101, 121-174 and 231).

[0284] In one embodiment, the alpha-amylase comprises the coding sequence of any alpha-amylase described or referenced herein (any one of SEQ ID NOs: 76-101, 121-174 and 231). In one embodiment, the alpha-amylase comprises a coding sequence that is a subsequence of the coding sequence from any alpha-amylase described or referenced herein, wherein the subsequence encodes a polypeptide having alpha-amylase activity. In one embodiment, the number of nucleotides residues in the subsequence is at least 75%, e.g., at least 80%, 85%, 90%, or 95% of the number of the referenced coding sequence.

[0285] The referenced alpha-amylase coding sequence of any related aspect or embodiment described herein can be the native coding sequence or a degenerate sequence, such as a codon-optimized coding sequence designed for use in a particular host cell (e.g., optimized for expression in Saccharomyces cerevisiae).

[0286] The alpha-amylase can also include fused polypeptides or cleavable fusion polypeptides, as described supra.

### Proteases

[0287] The host cells and fermenting organisms may express a heterologous protease (e.g., as a fusion protein of the invention). The protease can be any protease that is suitable for the host cells and fermenting organisms and/or their methods of use described herein, such as a naturally occurring protease or a variant thereof that retains protease activity. Any protease contemplated for expression by a host cell or fermenting organism described below is also contemplated for embodiments of the invention involving exogenous addition of a protease (e.g., added before, during or after liquefaction and/or saccharification).

[0288] Proteases are classified on the basis of their catalytic mechanism into the following groups: Serine proteases (S), Cysteine proteases (C), Aspartic proteases (A), Metallo proteases (M), and Unknown, or as yet unclassified, proteases (U), see Handbook of Proteolytic Enzymes, A. J. Barrett, N. D. Rawlings, J. F. Woessner (eds), Academic Press (1998), in particular the general introduction part.

[0289] Protease activity can be measured using any suitable assay, in which a substrate is employed, that includes peptide bonds relevant for the specificity of the protease in question. Assay-pH and assay-temperature are likewise to be adapted to the protease in question. Examples of assay-pH-values are pH 6, 7, 8, 9, 10, or 11. Examples of assay-temperatures are 30, 35, 37, 40, 45, 50, 55, 60, 65, 70 or 80° C.

[0290] In some embodiments, the host cell or fermenting organism comprising a heterologous polynucleotide encoding a protease has an increased level of protease activity compared to the host cell or fermenting organism without the heterologous polynucleotide encoding the protease, when cultivated under the same conditions. In some embodiments, the host cell or fermenting organism has an increased level of protease activity of at least 5%, e.g., at least 10%, at least 15%, at least 20%, at least 25%, at least 50%, at least 100%, at least 150%, at least 200%, at least 300%, or at 500% compared to the host cell or fermenting organism without the heterologous polynucleotide encoding the protease, when cultivated under the same conditions.

[0291] Exemplary proteases that may be expressed with the host cells and fermenting organisms, and used with the methods described herein include, but are not limited to, proteases shown in Table 3 (or derivatives thereof).

TABLE 3

| Donor Organism | SEQ ID NO: | |
|---|---|---|
| (catalytic domain) | (mature polypeptide) | Family |
| Aspergillus niger | 9 | A1 |
| Trichoderma reesei | 10 | |
| Thermoascus aurantiacus | 11 | M35 |
| Dichomitus squalens | 12 | S53 |
| Nocardiopsis prasina | 13 | S1 |
| Penicillium simplicissimum | 14 | S10 |
| Aspergillus niger | 15 | |
| Meriphilus giganteus | 16 | S53 |
| Lecanicillium sp. WMM742 | 17 | S53 |
| Talaromyces proteolyticus | 18 | S53 |
| Penicillium | 19 | A1A |
| ranomafanaense | | |
| Aspergillus oryzae | 20 | S53 |
| Talaromyces liani | 21 | S10 |
| Thermoascus | 22 | S53 |
| thermophilus | | |
| Pyrococcus furiosus | 23 | |
| Trichoderma reesei | 24 | |
| Rhizomucor miehei | 25 | |
| Lenzites betulinus | 26 | S53 |
| Neolentinus lepideus | 27 | S53 |
| Thermococcus sp. | 28 | S8 |
| Thermococcus sp. | 29 | S8 |
| Thermomyces | 30 | S53 |
| lanuginosus | | |
| Thermococcus | 31 | S53 |
| thioreducens | | |
| Polyporus arcularius | 32 | S53 |
| Ganoderma lucidum | 33 | S53 |
| Ganoderma lucidum | 34 | S53 |
| Ganoderma lucidum | 35 | S53 |
| Trametes sp. AH28-2 | 36 | S53 |
| Cinereomyces lindbladii | 37 | S53 |
| Trametes versicolor | 38 | S53 |
| O82DDP | | |
| Paecilomyces hepiali | 39 | S53 |
| Isaria tenuipes | 40 | S53 |
| Aspergillus tamarii | 41 | S53 |
| Aspergillus brasiliensis | 42 | S53 |
| Aspergillus iizukae | 43 | S53 |
| Penicillium sp-72364 | 44 | S10 |
| Aspergillus denticulatus | 45 | S10 |
| Hamigera sp. t184-6 | 46 | S10 |
| Penicillium janthinellum | 47 | S10 |
| Penicillium vasconiae | 48 | S10 |
| Hamigera paravellanea | 49 | S10 |
| Talaromyces variabilis | 50 | S10 |
| Penicillium arenicola | 51 | S10 |
| Nocardiopsis kunsanensis | 52 | S1 |
| Streptomyces parvulus | 53 | S1 |
| Saccharopolyspora | 54 | S1 |
| endophytica | | |
| luteus cell wall | 55 | S1 |
| enrichments K | | |
| Saccharothrix | 56 | S1 |
| australiensis | | |
| Nocardiopsis | 57 | S1 |
| baichengensis | | |
| Streptomyces sp. SM15 | 58 | S1 |
| Actinoalloteichus | 59 | S1 |
| spitiensis | | |
| Byssochlamys verrucosa | 60 | M35 |
| Hamigera terricola | 61 | M35 |
| Aspergillus tamarii | 62 | M35 |
| Aspergillus niveus | 63 | M35 |
| Penicillium sclerotiorum | 64 | A1 |
| Penicillium bilaiae | 65 | A1 |
| Penicillium antarcticum | 66 | A1 |
| Penicillium sumatrense | 67 | A1 |
| Trichoderma lixii | 68 | A1 |
| Trichoderma | 69 | A1 |
| brevicompactum | | |
| Penicillium | 70 | A1 |
| cinnamopurpureum | | |
| Bacillus licheniformis | 71 | S8 |
| Bacillus subtilis | 72 | S8 |
| Trametes cf versicol | 73 | S53 |

[0292] Additional polynucleotides encoding suitable proteases may be derived from microorganisms of any suitable genus, including those readily available within the UniProtKB database (www.uniprot.org).

[0293] In one embodiment, the protease is derived from Aspergillus, such as the Aspergillus niger protease of SEQ ID NO: 9, the Aspergillus tamarii protease of SEQ ID NO: 41, or the Aspergillus denticulatus protease of SEQ ID NO: 45. In one embodiment, the protease is derived from Dichomitus, such as the Dichomitus squalens protease of SEQ ID NO: 12. In one embodiment, the protease is derived from Penicillium, such as the Penicillium simplicissimum protease of SEQ ID NO: 14, the Penicillium antarcticum protease of SEQ ID NO: 66, or the Penicillium sumatrense protease of SEQ ID NO: 67. In one embodiment, the protease is derived from Meriphilus, such as the Meriphilus giganteus protease of SEQ ID NO: 16. In one embodiment, the protease is derived from Talaromyces, such as the Talaromyces liani protease of SEQ ID NO: 21. In one embodiment, the protease is derived from Thermoascus, such as the Thermoascus thermophilus protease of SEQ ID NO: 22. In one embodiment, the protease is derived from Ganoderma, such as the Ganoderma lucidum protease of SEQ ID NO: 33. In one embodiment, the protease is derived from Hamigera, such as the Hamigera terricola protease of SEQ ID NO: 61. In one embodiment, the protease is derived from Trichoderma, such as the Trichoderma brevicompactum protease of SEQ ID NO: 69.

[0294] The protease coding sequences can also be used to design nucleic acid probes to identify and clone DNA encoding proteases from strains of different genera or species, as described supra.

[0295] The polynucleotides encoding proteases may also be identified and obtained from other sources including microorganisms isolated from nature (e.g., soil, composts, water, etc.) or DNA samples obtained directly from natural materials (e.g., soil, composts, water, etc.) as described supra.

[0296] Techniques used to isolate or clone polynucleotides encoding proteases are described supra.

[0297] In one embodiment, the protease has a mature polypeptide sequence that comprises or consists of the amino acid sequence of any one of SEQ ID NOs: 9-73 (e.g., any one of SEQ ID NOs: 9, 14, 16, 21, 22, 33, 41, 45, 61, 62, 66, 67, and 69; such as any one of SEQ NOs: 9, 14, 16, and 69). In another embodiment, the protease has a mature polypeptide sequence that is a fragment of the protease of any one of SEQ ID NOs: 9-73 (e.g., wherein the fragment has protease activity). In one embodiment, the number of amino acid residues in the fragment is at least 75%, e.g., at least 80%, 85%, 90%, or 95% of the number of amino acid residues in referenced full length protease (e.g. any one of SEQ ID NOs: 9-73). In other embodiments, the protease may comprise the catalytic domain of any protease described or referenced herein (e.g., the catalytic domain of any one of SEQ ID NOs: 9-73).

[0298] The protease may be a variant of any one of the proteases described supra (e.g., any one of SEQ ID NOs: 9-73. In one embodiment, the protease has a mature polypeptide sequence of at least 60%, e.g., at least 65%, 70%, 75%, 80%, 85%, 90%, 95%, 97%, 98%, 99%, or 100% sequence identity to any one of the proteases described supra (e.g., any one of SEQ ID NOs: 9-73).

[0299] Examples of suitable amino acid changes, such as conservative substitutions that do not significantly affect the folding and/or activity of the protease, are described herein.

[0300] In one embodiment, the protease has a mature polypeptide sequence that differs by no more than ten amino acids, e.g., by no more than five amino acids, by no more than four amino acids, by no more than three amino acids, by no more than two amino acids, or by one amino acid from the amino acid sequence of any one of the proteases described supra (e.g., any one of SEQ ID NOs: 9-73). In one embodiment, the protease has an amino acid substitution, deletion, and/or insertion of one or more (e.g., two, several) of amino acid sequence of any one of the proteases described supra (e.g., any one of SEQ ID NOs: 9-73). In some embodiments, the total number of amino acid substitutions, deletions and/or insertions is not more than 10, e.g., not more than 9, 8, 7, 6, 5, 4, 3, 2, or 1.

[0301] In one embodiment, the protease coding sequence hybridizes under at least low stringency conditions, e.g., medium stringency conditions, medium-high stringency conditions, high stringency conditions, or very high stringency conditions with the full-length complementary strand of the coding sequence from any protease described or referenced herein (e.g., any one of SEQ ID NOs: 9-73). In one embodiment, the protease coding sequence has at least 65%, e.g., at least 70%, at least 75%, at least 80%, at least 85%, at least 85%, at least 90%, at least 91%, at least 92%, at least 93%, at least 94%, at least 95%, at least 96%, at least 97%, at least 98%, at least 99%, or 100% sequence identity with the coding sequence from any protease described or referenced herein (e.g., any one of SEQ ID NOs: 9-73).

[0302] In one embodiment, the protease comprises the coding sequence of any protease described or referenced herein (any one of SEQ ID NOs: 9-73). In one embodiment, the protease comprises a coding sequence that is a subsequence of the coding sequence from any protease described or referenced herein, wherein the subsequence encodes a polypeptide having protease activity. In one embodiment, the number of nucleotides residues in the subsequence is at least 75%, e.g., at least 80%, 85%, 90%, or 95% of the number of the referenced coding sequence.

[0303] The referenced protease coding sequence of any related aspect or embodiment described herein can be the native coding sequence or a degenerate sequence, such as a codon-optimized coding sequence designed for use in a particular host cell (e.g., optimized for expression in Saccharomyces cerevisiae).

[0304] The protease can also include fused polypeptides or cleavable fusion polypeptides, as described supra.

[0305] In one embodiment, the protease used according to a process described herein is a Serine proteases. In one particular embodiment, the protease is a serine protease belonging to the family 53, e.g., an endo-protease, such as S53 protease from Meriphilus giganteus, Dichomitus squalens Trametes versicolor, Polyporus arcularius, Lenzites betulinus, Ganoderma lucidum, Neolentinus lepideus, or Bacillus sp. 19138, in a process for producing ethanol from a starch-containing material, the ethanol yield was improved, when the S53 protease was present/or added during saccharification and/or fermentation of either gelatinized or un-gelatinized starch. In one embodiment, the proteases is selected from: (a) proteases belonging to the EC 3.4.21 enzyme group; and/or (b) proteases belonging to the EC 3.4.14 enzyme group; and/or (c) Serine proteases of the peptidase family S53 that comprises two different types of peptidases: tripeptidyl aminopeptidases (exo-type) and endo-peptidases; as described in 1993, Biochem. J. 290:205-218 and in MEROPS protease database, release, 9.4 (31 Jan. 2011) (www.merops.ac.uk). The database is described in Rawlings, N. D., Barrett, A. J. and Bateman, A., 2010, “MEROPS: the peptidase database”, Nucl. Acids Res. 38: D227-D233.

[0306] For determining whether a given protease is a Serine protease, and a family S53 protease, reference is made to the above Handbook and the principles indicated therein. Such determination can be carried out for all types of proteases, be it naturally occurring or wild-type proteases; or genetically engineered or synthetic proteases.

[0307] Peptidase family S53 contains acid-acting endopeptidases and tripeptidyl-peptidases. The residues of the catalytic triad are Glu, Asp, Ser, and there is an additional acidic residue, Asp, in the oxyanion hole. The order of the residues is Glu, Asp, Asp, Ser. The Ser residue is the nucleophile equivalent to Ser in the Asp, His, Ser triad of subtilisin, and the Glu of the triad is a substitute for the general base, His, in subtilisin.

[0308] The peptidases of the S53 family tend to be most active at acidic pH (unlike the homologous subtilisins), and this can be attributed to the functional importance of carboxylic residues, notably Asp in the oxyanion hole. The amino acid sequences are not closely similar to those in family S8 (i.e. serine endopeptidase subtilisins and homologues), and this, taken together with the quite different active site residues and the resulting lower pH for maximal activity, provides for a substantial difference to that family. Protein folding of the peptidase unit for members of this family resembles that of subtilisin, having the clan type SB.

[0309] In one embodiment, the protease used according to a process described herein is a cysteine protease.

[0310] In one embodiment, the protease used according to a process described herein is a Aspartic proteases. Aspartic acid proteases are described in, for example, Hand-book of Proteolytic Enzymes, Edited by A. J. Barrett, N. D. Rawlings and J. F. Woessner, Academic Press, San Diego, 1998, Chapter 270). Suitable examples of aspartic acid protease include, e.g., those disclosed in R. M. Berka et al. Gene, 96, 313 (1990)); (R. M. Berka et al. Gene, 125, 195-198 (1993)); and Gomi et al. Biosci. Biotech. Biochem. 57, 1095-1100 (1993), which are hereby incorporated by reference.

[0311] The protease also may be a metalloprotease, which is defined as a protease selected from the group consisting of:

[0312] (a) proteases belonging to EC 3.4.24 (metalloendopeptidases); preferably EC 3.4.24.39 (acid metallo proteinases);

[0313] (b) metalloproteases belonging to the M group of the above Handbook;

[0314] (c) metalloproteases not yet assigned to clans (designation: Clan MX), or belonging to either one of clans MA, MB, MC, MD, ME, MF, MG, MH (as defined at pp. 989-991 of the above Handbook);

[0315] (d) other families of metalloproteases (as defined at pp. 1448-1452 of the above Handbook);

[0316] (e) metalloproteases with a HEXXH motif;

[0317] (f) metalloproteases with an HEFTH motif;

[0318] (g) metalloproteases belonging to either one of families M3, M26, M27, M32, M34, M35, M36, M41, M43, or M47 (as defined at pp. 1448-1452 of the above Handbook);

[0319] (h) metalloproteases belonging to the M28E family; and

[0320] (i) metalloproteases belonging to family M35 (as defined at pp. 1492-1495 of the above Handbook).

[0321] In other particular embodiments, metalloproteases are hydrolases in which the nucleophilic attack on a peptide bond is mediated by a water molecule, which is activated by a divalent metal cation. Examples of divalent cations are zinc, cobalt or manganese. The metal ion may be held in place by amino acid ligands. The number of ligands may be five, four, three, two, one or zero. In a particular embodiment the number is two or three, preferably three.

[0322] There are no limitations on the origin of the metalloprotease used in a process of the invention. In an embodiment the metalloprotease is classified as EC 3.4.24, preferably EC 3.4.24.39. In one embodiment, the metalloprotease is an acid-stable metalloprotease, e.g., a fungal acid-stable metalloprotease, such as a metalloprotease derived from a strain of the genus Thermoascus, preferably a strain of Thermoascus aurantiacus, especially Thermoascus aurantiacus CGMCC No. 0670 (classified as EC 3.4.24.39). In another embodiment, the metalloprotease is derived from a strain of the genus Aspergillus, preferably a strain of Aspergillus oryzae.

[0323] In one embodiment the metalloprotease has a degree of sequence identity to amino acids −178 to 177, −159 to 177, or preferably amino acids 1 to 177 (the mature polypeptide) of SEQ ID NO: 1 of WO2010/008841 (a Thermoascus aurantiacus metalloprotease) of at least 80%, at least 82%, at least 85%, at least 90%, at least 95%, or at least 97%; and which have metalloprotease activity. In particular embodiments, the metalloprotease consists of an amino acid sequence with a degree of identity to SEQ ID NO: 1 as mentioned above.

[0324] The Thermoascus aurantiacus metalloprotease is a preferred example of a metalloprotease suitable for use in a process of the invention. Another metalloprotease is derived from Aspergillus oryzae and comprises the sequence of SEQ ID NO: 11 disclosed in WO2003/048353, or amino acids −23-353; −23-374; −23-397; 1-353; 1-374; 1-397; 177-353; 177-374; or 177-397 thereof, and SEQ ID NO: 10 disclosed in WO2003/048353.

[0325] Another metalloprotease suitable for use in a process of the invention is the Aspergillus oryzae metalloprotease comprising SEQ ID NO: 5 of WO2010/008841, or a metalloprotease is an isolated polypeptide which has a degree of identity to SEQ ID NO: 5 of at least about 80%, at least 82%, at least 85%, at least 90%, at least 95%, or at least 97%; and which have metalloprotease activity. In particular embodiments, the metalloprotease consists of the amino acid sequence of SEQ ID NO: 5 of WO2010/008841.

[0326] In a particular embodiment, a metalloprotease has an amino acid sequence that differs by forty, thirty-five, thirty, twenty-five, twenty, or by fifteen amino acids from amino acids −178 to 177, −159 to 177, or +1 to 177 of the amino acid sequences of the Thermoascus aurantiacus or Aspergillus oryzae metalloprotease.

[0327] In another embodiment, a metalloprotease has an amino acid sequence that differs by ten, or by nine, or by eight, or by seven, or by six, or by five amino acids from amino acids −178 to 177, −159 to 177, or +1 to 177 of the amino acid sequences of these metalloproteases, e.g., by four, by three, by two, or by one amino acid.

[0328] In particular embodiments, the metalloprotease a) comprises or b) consists of

[0329] i) the amino acid sequence of amino acids −178 to 177, −159 to 177, or +1 to 177 of SEQ ID NO:1 of WO2010/008841;

[0330] ii) the amino acid sequence of amino acids −23-353, −23-374, −23-397, 1-353, 1-374, 1-397, 177-353, 177-374, or 177-397 of SEQ ID NO: 3 of WO2010/008841;

[0331] iii) the amino acid sequence of SEQ ID NO: 5 of WO2010/008841; or allelic variants, or fragments, of the sequences of i), ii), and iii) that have protease activity.

[0332] A fragment of amino acids −178 to 177, −159 to 177, or +1 to 177 of SEQ ID NO: 1 of WO2010/008841 or of amino acids −23-353, −23-374, −23-397, 1-353, 1-374, 1-397, 177-353, 177-374, or 177-397 of SEQ ID NO: 3 of WO2010/008841; is a polypeptide having one or more amino acids deleted from the amino and/or carboxyl terminus of these amino acid sequences. In one embodiment a fragment contains at least 75 amino acid residues, or at least 100 amino acid residues, or at least 125 amino acid residues, or at least 150 amino acid residues, or at least 160 amino acid residues, or at least 165 amino acid residues, or at least 170 amino acid residues, or at least 175 amino acid residues.

[0333] To determine whether a given protease is a metallo protease or not, reference is made to the above “Handbook of Proteolytic Enzymes” and the principles indicated therein. Such determination can be carried out for all types of proteases, be it naturally occurring or wild-type proteases; or genetically engineered or synthetic proteases.

[0334] The protease may be a variant of, e.g., a wild-type protease, having thermostability properties defined herein. In one embodiment, the thermostable protease is a variant of a metallo protease. In one embodiment, the thermostable protease used in a process described herein is of fungal origin, such as a fungal metallo protease, such as a fungal metallo protease derived from a strain of the genus Thermoascus, preferably a strain of Thermoascus aurantiacus, especially Thermoascus aurantiacus CGMCC No. 0670 (classified as EC 3.4.24.39).

[0335] In one embodiment, the thermostable protease is a variant of the mature part of the metallo protease shown in SEQ ID NO: 2 disclosed in WO2003/048353 or the mature part of SEQ ID NO: 1 in WO2010/008841 further with one of the following substitutions or combinations of substitutions:

[0336] S5*+D79L+S87P+A112P+D142L;

[0337] D79L+S87P+A112P+T124V+D142L;

[0338] S5*+N26R+D79L+S87P+A112P+D142L;

[0339] N26R+T46R+D79L+S87P+A112P+D142L;

[0340] T46R+D79L+S87P+T116V+D142L;

[0341] D79L+P81R+S87P+A112P+D142L;

[0342] A27K+D79L+S87P+A112P+T124V+D142L;

[0343] D79L+Y82F+S87P+A112P+T124V+D142L;

[0344] D79L+Y82F+S87P+A112P+T124V+D142L;

[0345] D79L+S87P+A112P+T124V+A126V+D142L;

[0346] D79L+S87P+A112P+D142L;

[0347] D79L+Y82F+S87P+A112P+D142L;

[0348] S38T+D79L+S87P+A112P+A126V+D142L;

[0349] D79L+Y82F+S87P+A112P+A126V+D142L;

[0350] A27K+D79L+S87P+A112P+A126V+D142L;

[0351] D79L+S87P+N98C+A112P+G135C+D142L;

[0352] D79L+S87P+A112P+D142L+T141C+M161C;

[0353] S36P+D79L+S87P+A112P+D142L;

[0354] A37P+D79L+S87P+A112P+D142L;

[0355] S49P+D79L+S87P+A112P+D142L;

[0356] S50P+D79L+S87P+A112P+D142L;

[0357] D79L+S87P+D104P+A112P+D142L;

[0358] D79L+Y82F+S87G+A112P+D142L;

[0359] S70V+D79L+Y82F+S87G+Y97W+A112P+D142L;

[0360] D79L+Y82F+S87G+Y97W+D104P+A112P+D142L;

[0361] S70V+D79L+Y82F+S87G+A112P+D142L;

[0362] D79L+Y82F+S87G+D104P+A112P+D142L;

[0363] D79L+Y82F+S87G+A112P+A126V+D142L;

[0364] Y82F+S87G+S70V+D79L+D104P+A112P+D142L;

[0365] Y82F+S87G+D79L+D104P+A112P+A126V+D142L;

[0366] A27K+D79L+Y82F+S87G+D104P+A112P+A126V+D142L;

[0367] A27K+Y82F+S87G+D104P+A112P+A126V+D142L;

[0368] A27K+D79L+Y82F+D104P+A112P+A126V+D142L;

[0369] A27K+Y82F+D104P+A112P+A126V+D142L;

[0370] A27K+D79L+S87P+A112P+D142L; and

[0371] D79L+S87P+D142L.

[0372] In one embodiment, the thermostable protease is a variant of the metallo protease disclosed as the mature part of SEQ ID NO: 2 disclosed in WO2003/048353 or the mature part of SEQ ID NO: 1 in WO2010/008841 with one of the following substitutions or combinations of substitutions:

[0373] D79L+S87P+A112P+D142L;

[0374] D79L+S87P+D142L; and

[0375] A27K+D79L+Y82F+S87G+D104P+A112P+A126V+D142L.

[0376] In one embodiment, the protease variant has at least 75% identity preferably at least 80%, more preferably at least 85%, more preferably at least 90%, more preferably at least 91%, more preferably at least 92%, even more preferably at least 93%, most preferably at least 94%, and even most preferably at least 95%, such as even at least 96%, at least 97%, at least 98%, at least 99%, but less than 100% identity to the mature part of the polypeptide of SEQ ID NO: 2 disclosed in WO2003/048353 or the mature part of SEQ ID NO: 1 in WO2010/008841.

[0377] The thermostable protease may also be derived from any bacterium as long as the protease has the thermostability properties.

[0378] In one embodiment, the thermostable protease is derived from a strain of the bacterium Pyrococcus, such as a strain of Pyrococcus furiosus (pfu protease).

[0379] In one embodiment, the protease is one shown as SEQ ID NO: 1 in U.S. Pat. No. 6,358,726-B1 (Takara Shuzo Company).

[0380] In one embodiment, the thermostable protease is a protease having a mature polypeptide sequence of at least 80% identity, such as at least 85%, such as at least 90%, such as at least 95%, such as at least 96%, such as at least 97%, such as at least 98%, such as at least 99% identity to SEQ ID NO: 1 in U.S. Pat. No. 6,358,726-B1. The Pyroccus furiosus protease can be purchased from Takara Bio, Japan.

[0381] The Pyrococcus furiosus protease may be a thermostable protease as described in SEQ ID NO: 13 of WO2018/098381. This protease (PfuS) was found to have a thermostability of 110% (80° C./70° C.) and 103% (90° C./70° C.) at pH 4.5 determined.

[0382] In one embodiment a thermostable protease used in a process described herein has a thermostability value of more than 20% determined as Relative Activity at 80° C./70° C. determined as described in Example 2 of WO2018/098381.

[0383] In one embodiment, the protease has a thermostability of more than 30%, more than 40%, more than 50%, more than 60%, more than 70%, more than 80%, more than 90%, more than 100%, such as more than 105%, such as more than 110%, such as more than 115%, such as more than 120% determined as Relative Activity at 80° C./70° C.

[0384] In one embodiment, protease has a thermostability of between 20 and 50%, such as between 20 and 40%, such as 20 and 30% determined as Relative Activity at 80° C./70° C. In one embodiment, the protease has a thermostability between 50 and 115%, such as between 50 and 70%, such as between 50 and 60%, such as between 100 and 120%, such as between 105 and 115% determined as Relative Activity at 80° C./70° C.

[0385] In one embodiment, the protease has a thermostability value of more than 10% determined as Relative Activity at 85° C./70° C. determined as described in Example 2 of WO2018/098381.

[0386] In one embodiment, the protease has a thermostability of more than 10%, such as more than 12%, more than 14%, more than 16%, more than 18%, more than 20%, more than 30%, more than 40%, more that 50%, more than 60%, more than 70%, more than 80%, more than 90%, more than 100%, more than 110% determined as Relative Activity at 85° C./70° C.

[0387] In one embodiment, the protease has a thermostability of between 10% and 50%, such as between 10% and 30%, such as between 10% and 25% determined as Relative Activity at 85° C./70° C.

[0388] In one embodiment, the protease has more than 20%, more than 30%, more than 40%, more than 50%, more than 60%, more than 70%, more than 80%, more than 90% determined as Remaining Activity at 80° C.; and/or the protease has more than 20%, more than 30%, more than 40%, more than 50%, more than 60%, more than 70%, more than 80%, more than 90% determined as Remaining Activity at 84° C.

[0389] Determination of “Relative Activity” and “Remaining Activity” is done as described in Example 2 of WO2018/098381.

[0390] In one embodiment, the protease may have a thermostability for above 90, such as above 100 at 85° C. as determined using the Zein-BCA assay as disclosed in Example 3 of WO2018/098381.

[0391] In one embodiment, the protease has a thermostability above 60%, such as above 90%, such as above 100%, such as above 110% at 85° C. as determined using the Zein-BCA assay of WO2018/098381.

[0392] In one embodiment, protease has a thermostability between 60-120, such as between 70-120%, such as between 80-120%, such as between 90-120%, such as between 100-120%, such as 110-120% at 85° C. as determined using the Zein-BCA assay of WO2018/098381.

[0393] In one embodiment, the thermostable protease has at least 20%, such as at least 30%, such as at least 40%, such as at least 50%, such as at least 60%, such as at least 70%, such as at least 80%, such as at least 90%, such as at least 95%, such as at least 100% of the activity of the JTP196 protease variant or Protease Pfu determined by the AZCL-casein assay of WO2018/098381, and described herein.

[0394] In one embodiment, the thermostable protease has at least 20%, such as at least 30%, such as at least 40%, such as at least 50%, such as at least 60%, such as at least 70%, such as at least 80%, such as at least 90%, such as at least 95%, such as at least 100% of the protease activity of the Protease 196 variant or Protease Pfu determined by the AZCL-casein assay of WO2018/098381, and described herein.

### Beta-Glucosidase

[0395] The host cells and fermenting organisms may express a heterologous beta-glucosidase (e.g., as a fusion protein of the invention). The beta-glucosidase can be any beta-glucosidase that is suitable for the host cells, fermenting organisms and/or their methods of use described herein, such as a naturally occurring beta-glucosidase or a variant thereof that retains beta-glucosidase activity, including any beta-glucosidase described in the section entitled “Cellulolytic Enzymes and Compositions”. Any beta-glucosidase contemplated for expression by a host cell or fermenting organism described below is also contemplated for embodiments of the invention involving exogenous addition of a beta-glucosidase (e.g., added before, during or after liquefaction and/or saccharification).

[0396] In some embodiments, the host cell or fermenting organism comprising a heterologous polynucleotide encoding a beta-glucosidase has an increased level of beta-glucosidase activity compared to the host cells without the heterologous polynucleotide encoding the beta-glucosidase, when cultivated under the same conditions. In some embodiments, the host cell or fermenting organism has an increased level of beta-glucosidase activity of at least 5%, e.g., at least 10%, at least 15%, at least 20%, at least 25%, at least 50%, at least 100%, at least 150%, at least 200%, at least 300%, or at 500% compared to the host cell or fermenting organism without the heterologous polynucleotide encoding the beta-glucosidase, when cultivated under the same conditions.

[0397] Beta-glucosidases that may be expressed with the host cells and fermenting organisms, and used with the methods described herein include, but are not limited to an Aspergillus fumigatus beta-glucosidase (e.g., SEQ ID NO: 2 of WO2005/047499), an Aspergillus oryzae beta-glucosidase fusion protein (e.g., one disclosed in WO2008/057637, in particular as SEQ ID NO: 59 or 60), a Penicillium brasilianum beta-glucosidase (e.g., SEQ ID NO: 2 of WO2007/019442 or e.g., SEQ ID NO: 2 of WO2009/111706), a Trichophaea saccate beta-glucosidase (e.g., SEQ ID NO: 2 of WO2010/088387), a Thielavia terrestris beta-glucosidase (e.g., SEQ ID NO: 2 of WO2011/035029), a Penicillium oxalicum beta-glucosidase (e.g., SEQ ID NO: 2 of WO2012/003379), an Aspergillus aculeatus beta-glucosidase (e.g., SEQ ID NO: 2, 4, 6, 8 or 10 of WO2012/030845), a Talaromyces leycettanus beta-glucosidase (e.g., SEQ ID NO: 2, 4, 6 or 8 of WO2013/074956), a Trametes versicolor beta-glucosidase (e.g., SEQ ID NO: 2 or 4 of U.S. Pat. No. 8,709,776), a Lentinus similis beta-glucosidase (e.g., SEQ ID NO: 2 or 4 of U.S. Pat. No. 8,715,995), a Hohenbuehelis mastrucata beta-glucosidase (e.g., SEQ ID NO: 2, 4, 6, 8, 10 or 12 of U.S. Pat. No. 8,715,994 or a beta-glucosidase from a thermophilic fungi (e.g., SEQ ID NO: 2, 4, 6, 8, 10, 12, 14, 16, 18, 20, 22, 24, 26, 28, 30, 32, 34, 36 or 38 of WO2013/091544)

[0398] Additional polynucleotides encoding suitable beta-glucosidases may be derived from microorganisms of any suitable genus, including those readily available within the UniProtKB database (www.uniprot.org).

[0399] The beta-glucosidase coding sequences can also be used to design nucleic acid probes to identify and clone DNA encoding beta-glucosidases from strains of different genera or species, as described supra.

[0400] The polynucleotides encoding beta-glucosidases may also be identified and obtained from other sources including microorganisms isolated from nature (e.g., soil, composts, water, etc.) or DNA samples obtained directly from natural materials (e.g., soil, composts, water, etc.) as described supra.

[0401] Techniques used to isolate or clone polynucleotides encoding beta-glucosidases are described supra.

[0402] In one embodiment, the beta-glucosidase has a mature polypeptide sequence that comprises or consists of the amino acid sequence of any one of the beta-glucosidases described or referenced herein (e.g., SEQ ID NO: 441). In another embodiment, the beta-glucosidase has a mature polypeptide sequence that is a fragment of the any one of the beta-glucosidases described or referenced herein (e.g., SEQ ID NO: 441). In one embodiment, the number of amino acid residues in the fragment is at least 75%, e.g., at least 80%, 85%, 90%, or 95% of the number of amino acid residues in referenced full length beta-glucosidase (e.g. SEQ ID NO: 441). In other embodiments, the beta-glucosidase may comprise the catalytic domain of any beta-glucosidase described or referenced herein (e.g., the catalytic domain of e.g., SEQ ID NO: 441).

[0403] The beta-glucosidase may be a variant of any one of the beta-glucosidases described supra (e.g., SEQ ID NO: 441). In one embodiment, the beta-glucosidase has a mature polypeptide sequence of at least 60%, e.g., at least 65%, 70%, 75%, 80%, 85%, 90%, 95%, 97%, 98%, 99%, or 100% sequence identity to any one of the beta-glucosidases described supra (e.g., SEQ ID NO: 441).

[0404] Examples of suitable amino acid changes, such as conservative substitutions that do not significantly affect the folding and/or activity of the beta-glucosidase are described herein.

[0405] In one embodiment, the beta-glucosidase has a mature polypeptide sequence that differs by no more than ten amino acids, e.g., by no more than five amino acids, by no more than four amino acids, by no more than three amino acids, by no more than two amino acids, or by one amino acid from the amino acid sequence of any one of the beta-glucosidases described supra (e.g., SEQ ID NO: 441). In one embodiment, the beta-glucosidase has an amino acid substitution, deletion, and/or insertion of one or more (e.g., two, several) of amino acid sequence of any one of the beta-glucosidases described supra (e.g., SEQ ID NO: 441). In some embodiments, the total number of amino acid substitutions, deletions and/or insertions is not more than 10, e.g., not more than 9, 8, 7, 6, 5, 4, 3, 2, or 1.

[0406] In some embodiments, the beta-glucosidase has at least 20%, e.g., at least 40%, at least 50%, at least 60%, at least 70%, at least 80%, at least 90%, at least 95%, at least 96%, at least 97%, at least 98%, at least 99%, or 100% of the beta-glucosidase activity of any beta-glucosidase described or referenced herein (e.g., SEQ ID NO: 441) under the same conditions.

[0407] In one embodiment, the beta-glucosidase coding sequence hybridizes under at least low stringency conditions, e.g., medium stringency conditions, medium-high stringency conditions, high stringency conditions, or very high stringency conditions with the full-length complementary strand of the coding sequence from any beta-glucosidase described or referenced herein (e.g., SEQ ID NO: 441). In one embodiment, the beta-glucosidase coding sequence has at least 65%, e.g., at least 70%, at least 75%, at least 80%, at least 85%, at least 85%, at least 90%, at least 91%, at least 92%, at least 93%, at least 94%, at least 95%, at least 96%, at least 97%, at least 98%, at least 99%, or 100% sequence identity with the coding sequence from any beta-glucosidase described or referenced herein (e.g., SEQ ID NO: 441).

[0408] In one embodiment, the beta-glucosidase comprises the coding sequence of any beta-glucosidase described or referenced herein (e.g., SEQ ID NO: 441). In one embodiment, the beta-glucosidase comprises a coding sequence that is a subsequence of the coding sequence from any beta-glucosidase described or referenced herein, wherein the subsequence encodes a polypeptide having beta-glucosidase activity. In one embodiment, the number of nucleotides residues in the subsequence is at least 75%, e.g., at least 80%, 85%, 90%, or 95% of the number of the referenced coding sequence.

[0409] The referenced beta-glucosidase coding sequence of any related aspect or embodiment described herein can be the native coding sequence or a degenerate sequence, such as a codon-optimized coding sequence designed for use in a particular host cell (e.g., optimized for expression in Saccharomyces cerevisiae).

[0410] The beta-glucosidase can also include fused polypeptides or cleavable fusion polypeptides, as described supra.

### Phospholipases

[0411] The host cells and fermenting organisms may express a heterologous phospholipase. The phospholipase may be any phospholipase that is suitable for the host cells, fermenting organism, and/or the methods described herein, such as a naturally occurring phospholipase (e.g., a native phospholipase from another species or an endogenous phospholipase expressed from a modified expression vector) or a variant thereof that retains phospholipase activity. Any phospholipase contemplated for expression by a host cell or fermenting organism described below is also contemplated for embodiments of the invention involving exogenous addition of a phospholipase (e.g., added before, during or after liquefaction and/or saccharification).

[0412] In some embodiments, the host cell or fermenting organism comprises a heterologous polynucleotide encoding a phospholipase, for example, as described in WO2018/075430, the content of which is hereby incorporated by reference. In some embodiments, the phospholipase is classified as a phospholipase A. In other embodiments, the phospholipase is classified as a phospholipase C. Any phospholipase described or referenced herein is contemplated for expression in the host cell or fermenting organism.

[0413] In some embodiments, the host cell or fermenting organism comprising a heterologous polynucleotide encoding a phospholipase has an increased level of phospholipase activity compared to the host cells without the heterologous polynucleotide encoding the phospholipase, when cultivated under the same conditions. In some embodiments, the host cell or fermenting organism has an increased level of phospholipase activity of at least 5%, e.g., at least 10%, at least 15%, at least 20%, at least 25%, at least 50%, at least 100%, at least 150%, at least 200%, at least 300%, or at 500% compared to the host cell or fermenting organism without the heterologous polynucleotide encoding the phospholipase, when cultivated under the same conditions.

[0414] Exemplary phospholipases that can be used with the host cells and/or the methods described herein include bacterial, yeast, or filamentous fungal phospholipases, e.g., derived from any of the microorganisms described or referenced herein.

[0415] Additional phospholipases that may be expressed with the host cells and fermenting organisms, and used with the methods described herein, and include, but are not limited to phospholipases shown in Table 4 (or derivatives thereof).

TABLE 4

| Donor Organism | SEQ ID NO: |
|---|---|
| (catalytic domain) | (mature polypeptide) |
| Thermomyces lanuginosus | 235 |
| Talaromyces leycettanus | 236 |
| Penicillium emersonii | 237 |
| Bacillus thuringiensis | 238 |
| Pseudomonas sp. | 239 |
| Kionochaeta sp. | 240 |
| Mariannaea pinicola | 241 |
| Fictibacillus macauensis | 242 |

[0416] Additional phospholipases contemplated for use with the present invention can be found in WO2018/075430 (the content of which is incorporated herein).

[0417] Additional polynucleotides encoding suitable phospholipases may be obtained from microorganisms of any genus, including those readily available within the UniProtKB database (www.uniprot.org).

[0418] The phospholipase coding sequences can also be used to design nucleic acid probes to identify and clone DNA encoding phospholipases from strains of different genera or species, as described supra.

[0419] The polynucleotides encoding phospholipases may also be identified and obtained from other sources including microorganisms isolated from nature (e.g., soil, composts, water, etc.) or DNA samples obtained directly from natural materials (e.g., soil, composts, water, etc.) as described supra.

[0420] Techniques used to isolate or clone polynucleotides encoding phospholipases are described supra.

[0421] In one embodiment, the phospholipase has a mature polypeptide sequence that comprises or consists of the amino acid sequence of any one of the phospholipases described or referenced herein (e.g., any one of SEQ ID NOs: 235, 236, 237, 238, 239, 240, 241 and 242). In another embodiment, the phospholipase has a mature polypeptide sequence that is a fragment of the any one of the phospholipases described or referenced herein (e.g., any one of SEQ ID NOs: 235, 236, 237, 238, 239, 240, 241 and 242). In one embodiment, the number of amino acid residues in the fragment is at least 75%, e.g., at least 80%, 85%, 90%, or 95% of the number of amino acid residues in referenced full length phospholipase (e.g. any one of SEQ ID NOs: 235, 236, 237, 238, 239, 240, 241 and 242). In other embodiments, the phospholipase may comprise the catalytic domain of any phospholipase described or referenced herein (e.g., the catalytic domain of any one of SEQ ID NOs: 235, 236, 237, 238, 239, 240, 241 and 242).

[0422] The phospholipase may be a variant of any one of the phospholipases described supra (e.g., any one of SEQ ID NOs: SEQ ID NOs: 235, 236, 237, 238, 239, 240, 241 and 242). In one embodiment, the phospholipase has a mature polypeptide sequence of at least 60%, e.g., at least 65%, 70%, 75%, 80%, 85%, 90%, 95%, 97%, 98%, 99%, or 100% sequence identity to any one of the phospholipases described supra (e.g., any one of SEQ ID NOs: 235, 236, 237, 238, 239, 240, 241 and 242).

[0423] Examples of suitable amino acid changes, such as conservative substitutions that do not significantly affect the folding and/or activity of the phospholipase, are described herein.

[0424] In one embodiment, the phospholipase has a mature polypeptide sequence that differs by no more than ten amino acids, e.g., by no more than five amino acids, by no more than four amino acids, by no more than three amino acids, by no more than two amino acids, or by one amino acid from the amino acid sequence of any one of the phospholipases described supra (e.g., any one of SEQ ID NOs: 235, 236, 237, 238, 239, 240, 241 and 242). In one embodiment, the phospholipase has an amino acid substitution, deletion, and/or insertion of one or more (e.g., two, several) of amino acid sequence of any one of the phospholipases described supra (e.g., any one of SEQ ID NOs: 235, 236, 237, 238, 239, 240, 241 and 242). In some embodiments, the total number of amino acid substitutions, deletions and/or insertions is not more than 10, e.g., not more than 9, 8, 7, 6, 5, 4, 3, 2, or 1.

[0425] In some embodiments, the phospholipase has at least 20%, e.g., at least 40%, at least 50%, at least 60%, at least 70%, at least 80%, at least 90%, at least 95%, at least 96%, at least 97%, at least 98%, at least 99%, or 100% of the phospholipase activity of any phospholipase described or referenced herein (e.g., any one of SEQ ID NOs: 235, 236, 237, 238, 239, 240, 241 and 242) under the same conditions.

[0426] In one embodiment, the phospholipase coding sequence hybridizes under at least low stringency conditions, e.g., medium stringency conditions, medium-high stringency conditions, high stringency conditions, or very high stringency conditions with the full-length complementary strand of the coding sequence from any phospholipase described or referenced herein (e.g., a coding sequence for a phospholipase of SEQ ID NO: 235, 236, 237, 238, 239, 240, 241 or 242). In one embodiment, the phospholipase coding sequence has at least 65%, e.g., at least 70%, at least 75%, at least 80%, at least 85%, at least 85%, at least 90%, at least 91%, at least 92%, at least 93%, at least 94%, at least 95%, at least 96%, at least 97%, at least 98%, at least 99%, or 100% sequence identity with the coding sequence from any phospholipase described or referenced herein (e.g., a coding sequence for a phospholipase of SEQ ID NO: 235, 236, 237, 238, 239, 240, 241 or 242).

[0427] In one embodiment, the phospholipase comprises the coding sequence of any phospholipase described or referenced herein (e.g., a coding sequence for a phospholipase of SEQ ID NO: 235, 236, 237, 238, 239, 240, 241 or 242). In one embodiment, the phospholipase comprises a coding sequence that is a subsequence of the coding sequence from any phospholipase described or referenced herein, wherein the subsequence encodes a polypeptide having phospholipase activity. In one embodiment, the number of nucleotides residues in the subsequence is at least 75%, e.g., at least 80%, 85%, 90%, or 95% of the number of the referenced coding sequence.

[0428] The referenced phospholipase coding sequence of any related aspect or embodiment described herein can be the native coding sequence or a degenerate sequence, such as a codon-optimized coding sequence designed for use in a particular host cell (e.g., optimized for expression in Saccharomyces cerevisiae).

[0429] The phospholipase can also include fused polypeptides or cleavable fusion polypeptides, as described supra.

### Trehalases

[0430] The host cells and fermenting organisms may express a heterologous trehalase. The trehalase can be any trehalase that is suitable for the host cells, fermenting organisms and/or their methods of use described herein, such as a naturally occurring trehalase or a variant thereof that retains trehalase activity. Any trehalase contemplated for expression by a host cell or fermenting organism described below is also contemplated for embodiments of the invention involving exogenous addition of a trehalase (e.g., added before, during or after liquefaction and/or saccharification).

[0431] In some embodiments, the host cell or fermenting organism comprising a heterologous polynucleotide encoding a trehalase has an increased level of trehalase activity compared to the host cells without the heterologous polynucleotide encoding the trehalase, when cultivated under the same conditions. In some embodiments, the host cell or fermenting organism has an increased level of trehalase activity of at least 5%, e.g., at least 10%, at least 15%, at least 20%, at least 25%, at least 50%, at least 100%, at least 150%, at least 200%, at least 300%, or at 500% compared to the host cell or fermenting organism without the heterologous polynucleotide encoding the trehalase, when cultivated under the same conditions.

[0432] Trehalases that may be expressed with the host cells and fermenting organisms, and used with the methods described herein include, but are not limited to, trehalases shown in Table 5 (or derivatives thereof).

TABLE 5

| Donor Organism | SEQ ID NO: |
|---|---|
| (catalytic domain) | (mature polypeptide) |
| Chaetomium megalocarpum | 175 |
| Lecanicillium psalliotae | 176 |
| Doratomyces sp | 177 |
| Mucor moelleri | 178 |
| Phialophora cyclaminis | 179 |
| Thielavia arenaria | 180 |
| Thielavia antarctica | 181 |
| Chaetomium sp | 182 |
| Chaetomium nigricolor | 183 |
| Chaetomium jodhpurense | 184 |
| Chaetomium piluliferum | 185 |
| Myceliophthora hinnulea | 186 |
| Chloridium virescens | 187 |
| Gelasinospora cratophora | 188 |
| Acidobacteriaceae bacterium | 189 |
| Acidobacterium capsulatum | 190 |
| Acidovorax wautersii | 191 |
| Xanthomonas arboricola | 192 |
| Kosakonia sacchari | 193 |
| Enterobacter sp | 194 |
| Saitozyma flava | 195 |
| Phaeotremella skinneri | 196 |
| Trichoderma asperellum | 197 |
| Corynascus sepedonium | 198 |
| Myceliophthora thermophila | 199 |
| Trichoderma reesei | 200 |
| Chaetomium virescens | 201 |
| Rhodothermus marinus | 202 |
| Myceliophthora sepedonium | 203 |
| Moelleriella libera | 204 |
| Acremonium dichromosporum | 205 |
| Fusarium sambucinum | 206 |
| Phoma sp | 207 |
| Lentinus similis | 208 |
| Diaporthe nobilis | 209 |
| Solicoccozyma terricola | 210 |
| Dioszegia cryoxerica | 211 |
| Talaromyces funiculosus | 212 |
| Hamigera avellanea | 213 |
| Talaromyces ruber | 214 |
| Trichoderma lixii | 215 |
| Aspergillus cervinus | 216 |
| Rasamsonia brevistipitata | 217 |
| Acremonium curvulum | 218 |
| Talaromyces piceae | 219 |
| Penicillium sp | 220 |
| Talaromyces aurantiacus | 221 |
| Talaromyces pinophilus | 222 |
| Talaromyces leycettanus | 223 |
| Talaromyces variabilis | 224 |
| Aspergillus niger | 225 |
| Trichoderma reesei | 226 |

[0433] Additional polynucleotides encoding suitable trehalases may be derived from microorganisms of any suitable genus, including those readily available within the UniProtKB database (www.uniprot.org).

[0434] The trehalase coding sequences can also be used to design nucleic acid probes to identify and clone DNA encoding trehalases from strains of different genera or species, as described supra.

[0435] The polynucleotides encoding trehalases may also be identified and obtained from other sources including microorganisms isolated from nature (e.g., soil, composts, water, etc.) or DNA samples obtained directly from natural materials (e.g., soil, composts, water, etc.) as described supra.

[0436] Techniques used to isolate or clone polynucleotides encoding trehalases are described supra.

[0437] In one embodiment, the trehalase has a mature polypeptide sequence that comprises or consists of the amino acid sequence of any one of the trehalases described or referenced herein (e.g., any one of SEQ ID NOs: 175-226). In another embodiment, the trehalase has a mature polypeptide sequence that is a fragment of the any one of the trehalases described or referenced herein (e.g., any one of SEQ ID NOs: 175-226). In one embodiment, the number of amino acid residues in the fragment is at least 75%, e.g., at least 80%, 85%, 90%, or 95% of the number of amino acid residues in referenced full length trehalase (e.g. any one of SEQ ID NOs: 175-226). In other embodiments, the trehalase may comprise the catalytic domain of any trehalase described or referenced herein (e.g., the catalytic domain of any one of SEQ ID NOs: 175-226).

[0438] The trehalase may be a variant of any one of the trehalases described supra (e.g., any one of SEQ ID NOs: 175-226). In one embodiment, the trehalase has a mature polypeptide sequence of at least 60%, e.g., at least 65%, 70%, 75%, 80%, 85%, 90%, 95%, 97%, 98%, 99%, or 100% sequence identity to any one of the trehalases described supra (e.g., any one of SEQ ID NOs: 175-226).

[0439] Examples of suitable amino acid changes, such as conservative substitutions that do not significantly affect the folding and/or activity of the trehalase, are described herein.

[0440] In one embodiment, the trehalase has a mature polypeptide sequence that differs by no more than ten amino acids, e.g., by no more than five amino acids, by no more than four amino acids, by no more than three amino acids, by no more than two amino acids, or by one amino acid from the amino acid sequence of any one of the trehalases described supra (e.g., any one of SEQ ID NOs: 175-226). In one embodiment, the trehalase has an amino acid substitution, deletion, and/or insertion of one or more (e.g., two, several) of amino acid sequence of any one of the trehalases described supra (e.g., any one of SEQ ID NOs: 175-226). In some embodiments, the total number of amino acid substitutions, deletions and/or insertions is not more than 10, e.g., not more than 9, 8, 7, 6, 5, 4, 3, 2, or 1.

[0441] In some embodiments, the trehalase has at least 20%, e.g., at least 40%, at least 50%, at least 60%, at least 70%, at least 80%, at least 90%, at least 95%, at least 96%, at least 97%, at least 98%, at least 99%, or 100% of the trehalase activity of any trehalase described or referenced herein (e.g., any one of SEQ ID NOs: 175-226) under the same conditions.

[0442] In one embodiment, the trehalase coding sequence hybridizes under at least low stringency conditions, e.g., medium stringency conditions, medium-high stringency conditions, high stringency conditions, or very high stringency conditions with the full-length complementary strand of the coding sequence from any trehalase described or referenced herein (e.g., any one of SEQ ID NOs: 175-226). In one embodiment, the trehalase coding sequence has at least 65%, e.g., at least 70%, at least 75%, at least 80%, at least 85%, at least 85%, at least 90%, at least 91%, at least 92%, at least 93%, at least 94%, at least 95%, at least 96%, at least 97%, at least 98%, at least 99%, or 100% sequence identity with the coding sequence from any trehalase described or referenced herein (e.g., any one of SEQ ID NOs: 175-226).

[0443] In one embodiment, the trehalase comprises the coding sequence of any trehalase described or referenced herein (any one of SEQ ID NOs: 175-226). In one embodiment, the trehalase comprises a coding sequence that is a subsequence of the coding sequence from any trehalase described or referenced herein, wherein the subsequence encodes a polypeptide having trehalase activity. In one embodiment, the number of nucleotides residues in the subsequence is at least 75%, e.g., at least 80%, 85%, 90%, or 95% of the number of the referenced coding sequence.

[0444] The referenced trehalase coding sequence of any related aspect or embodiment described herein can be the native coding sequence or a degenerate sequence, such as a codon-optimized coding sequence designed for use in a particular host cell (e.g., optimized for expression in Saccharomyces cerevisiae).

[0445] The trehalase can also include fused polypeptides or cleavable fusion polypeptides, as described supra.

### Pullulanases

[0446] The host cells and fermenting organisms may express a heterologous pullulanase. The pullulanase can be any protease that is suitable for the host cells and fermenting organisms and/or their methods of use described herein, such as a naturally occurring pullulanase or a variant thereof that retains pullulanase activity. Any pullulanase contemplated for expression by a host cell or fermenting organism described below is also contemplated for embodiments of the invention involving exogenous addition of a pullulanase (e.g., added before, during or after liquefaction and/or saccharification).

[0447] In some embodiments, the host cell or fermenting organism comprising a heterologous polynucleotide encoding a pullulanase has an increased level of pullulanase activity compared to the host cells without the heterologous polynucleotide encoding the pullulanase, when cultivated under the same conditions. In some embodiments, the host cell or fermenting organism has an increased level of pullulanase activity of at least 5%, e.g., at least 10%, at least 15%, at least 20%, at least 25%, at least 50%, at least 100%, at least 150%, at least 200%, at least 300%, or at 500% compared to the host cell or fermenting organism without the heterologous polynucleotide encoding the pullulanase, when cultivated under the same conditions.

[0448] Exemplary pullulanases that can be used with the host cells and/or the methods described herein include bacterial, yeast, or filamentous fungal pullulanases, e.g., obtained from any of the microorganisms described or referenced herein.

[0449] Contemplated pullulanases include the pullulanases from Bacillus amyloderamificans disclosed in U.S. Pat. No. 4,560,651 (hereby incorporated by reference), the pullulanase disclosed as SEQ ID NO: 2 in WO01/151620 (hereby incorporated by reference), the Bacillus deramificans disclosed as SEQ ID NO: 4 in WO01/151620 (hereby incorporated by reference), and the pullulanase from Bacillus acidopullulyticus disclosed as SEQ ID NO: 6 in WO01/151620 (hereby incorporated by reference) and also described in FEMS Mic. Let. (1994) 115, 97-106.

[0450] Additional pullulanases contemplated include the pullulanases from Pyrococcus woesei, specifically from Pyrococcus woesei DSM No. 3773 disclosed in WO92/02614.

[0451] In one embodiment, the pullulanase is a family GH57 pullulanase. In one embodiment, the pullulanase includes an X47 domain as disclosed in U.S. 61/289,040 published as WO2011/087836 (which are hereby incorporated by reference). More specifically the pullulanase may be derived from a strain of the genus Thermococcus, including Thermococcus litoralis and Thermococcus hydrothermalis, such as the Thermococcus hydrothermalis pullulanase truncated at site X4 right after the X47 domain (i.e., amino acids 1-782). The pullulanase may also be a hybrid of the Thermococcus litoralis and Thermococcus hydrothermalis pullulanases or a T. hydrothermalis/T. litoralis hybrid enzyme with truncation site X4 disclosed in U.S. 61/289,040 published as WO2011/087836 (which is hereby incorporated by reference).

[0452] In another embodiment, the pullulanase is one comprising an X46 domain disclosed in WO2011/076123 (Novozymes).

[0453] The pullulanase may be added in an effective amount which include the preferred amount of about 0.0001-10 mg enzyme protein per gram DS, preferably 0.0001-0.10 mg enzyme protein per gram DS, more preferably 0.0001-0.010 mg enzyme protein per gram DS. Pullulanase activity may be determined as NPUN. An Assay for determination of NPUN is described in WO2018/098381.

[0454] Suitable commercially available pullulanase products include PROMOZYME D, PROMOZYME™ D2 (Novozymes A/S, Denmark), OPTIMAX L-300 (DuPont-Danisco, USA), and AMANO 8 (Amano, Japan).

[0455] In one embodiment, the pullulanase is derived from the Bacillus subtilis pullulanase of SEQ ID NO: 114. In one embodiment, the pullulanase is derived from the Bacillus licheniformis pullulanase of SEQ ID NO: 115. In one embodiment, the pullulanase is derived from the Oryza sativa pullulanase of SEQ ID NO: 116. In one embodiment, the pullulanase is derived from the Triticum aestivum pullulanase of SEQ ID NO: 117. In one embodiment, the pullulanase is derived from the Clostridium phytofermentans pullulanase of SEQ ID NO: 118. In one embodiment, the pullulanase is derived from the Streptomyces avermitilis pullulanase of SEQ ID NO: 119. In one embodiment, the pullulanase is derived from the Klebsiella pneumoniae pullulanase of SEQ ID NO: 120.

[0456] Additional pullulanases contemplated for use with the present invention can be found in WO2011/153516 (the content of which is incorporated herein).

[0457] Additional polynucleotides encoding suitable pullulanases may be obtained from microorganisms of any genus, including those readily available within the UniProtKB database (www.uniprot.org).

[0458] The pullulanase coding sequences can also be used to design nucleic acid probes to identify and clone DNA encoding pullulanases from strains of different genera or species, as described supra.

[0459] The polynucleotides encoding pullulanases may also be identified and obtained from other sources including microorganisms isolated from nature (e.g., soil, composts, water, etc.) or DNA samples obtained directly from natural materials (e.g., soil, composts, water, etc.) as described supra.

[0460] Techniques used to isolate or clone polynucleotides encoding pullulanases are described supra.

[0461] In one embodiment, the pullulanase has a mature polypeptide sequence that comprises or consists of the amino acid sequence of any one of the pullulanases described or referenced herein (e.g., any one of SEQ ID NOs: 114-120). In another embodiment, the pullulanase has a mature polypeptide sequence that is a fragment of the any one of the pullulanases described or referenced herein (e.g., any one of SEQ ID NOs: 114-120). In one embodiment, the number of amino acid residues in the fragment is at least 75%, e.g., at least 80%, 85%, 90%, or 95% of the number of amino acid residues in referenced full length pullulanase. In other embodiments, the pullulanase may comprise the catalytic domain of any pullulanase described or referenced herein (e.g., any one of SEQ ID NOs: 114-120).

[0462] The pullulanase may be a variant of any one of the pullulanases described supra (e.g., any one of SEQ ID NOs: 114-120). In one embodiment, the pullulanase has a mature polypeptide sequence of at least 60%, e.g., at least 65%, 70%, 75%, 80%, 85%, 90%, 95%, 97%, 98%, 99%, or 100% sequence identity to any one of the pullulanases described supra (e.g., any one of SEQ ID NOs: 114-120).

[0463] Examples of suitable amino acid changes, such as conservative substitutions that do not significantly affect the folding and/or activity of the pullulanase, are described herein.

[0464] In one embodiment, the pullulanase has a mature polypeptide sequence that differs by no more than ten amino acids, e.g., by no more than five amino acids, by no more than four amino acids, by no more than three amino acids, by no more than two amino acids, or by one amino acid from the amino acid sequence of any one of the pullulanases described supra (e.g., any one of SEQ ID NOs: 114-120). In one embodiment, the pullulanase has an amino acid substitution, deletion, and/or insertion of one or more (e.g., two, several) of amino acid sequence of any one of the pullulanases described supra (e.g., any one of SEQ ID NOs: 114-120). In some embodiments, the total number of amino acid substitutions, deletions and/or insertions is not more than 10, e.g., not more than 9, 8, 7, 6, 5, 4, 3, 2, or 1.

[0465] In some embodiments, the pullulanase has at least 20%, e.g., at least 40%, at least 50%, at least 60%, at least 70%, at least 80%, at least 90%, at least 95%, at least 96%, at least 97%, at least 98%, at least 99%, or 100% of the pullulanase activity of any pullulanase described or referenced herein under the same conditions (e.g., any one of SEQ ID NOs: 114-120).

[0466] In one embodiment, the pullulanase coding sequence hybridizes under at least low stringency conditions, e.g., medium stringency conditions, medium-high stringency conditions, high stringency conditions, or very high stringency conditions with the full-length complementary strand of the coding sequence from any pullulanase described or referenced herein (e.g., any one of SEQ ID NOs: 114-120). In one embodiment, the pullulanase coding sequence has at least 65%, e.g., at least 70%, at least 75%, at least 80%, at least 85%, at least 85%, at least 90%, at least 91%, at least 92%, at least 93%, at least 94%, at least 95%, at least 96%, at least 97%, at least 98%, at least 99%, or 100% sequence identity with the coding sequence from any pullulanase described or referenced herein (e.g., any one of SEQ ID NOs: 114-120).

[0467] In one embodiment, the pullulanase comprises the coding sequence of any pullulanase described or referenced herein (e.g., any one of SEQ ID NOs: 114-120). In one embodiment, the pullulanase comprises a coding sequence that is a subsequence of the coding sequence from any pullulanase described or referenced herein, wherein the subsequence encodes a polypeptide having pullulanase activity. In one embodiment, the number of nucleotides residues in the subsequence is at least 75%, e.g., at least 80%, 85%, 90%, or 95% of the number of the referenced coding sequence.

[0468] The referenced pullulanase coding sequence of any related aspect or embodiment described herein can be the native coding sequence or a degenerate sequence, such as a codon-optimized coding sequence designed for use in a particular host cell (e.g., optimized for expression in Saccharomyces cerevisiae).

[0469] The pullulanase can also include fused polypeptides or cleavable fusion polypeptides, as described supra.

### Gene Disruptions

[0470] The host cells and fermenting organisms described herein may also comprise one or more (e.g., two, several) gene disruptions, e.g., to divert sugar metabolism from undesired products to ethanol. In some embodiments, the recombinant host cells produce a greater amount of ethanol compared to the cell without the one or more disruptions when cultivated under identical conditions. In some embodiments, one or more of the disrupted endogenous genes is inactivated.

[0471] In certain embodiments, the host cell or fermenting organism provided herein comprises a disruption of one or more endogenous genes encoding enzymes involved in producing alternate fermentative products such as glycerol or other byproducts such as acetate or diols. For example, the cells provided herein may comprise a disruption of one or more of glycerol 3-phosphate dehydrogenase (GPD, catalyzes reaction of dihydroxyacetone phosphate to glycerol 3-phosphate), glycerol 3-phosphatase (GPP, catalyzes conversion of glycerol-3 phosphate to glycerol), glycerol kinase (catalyzes conversion of glycerol 3-phosphate to glycerol), dihydroxyacetone kinase (catalyzes conversion of dihydroxyacetone phosphate to dihydroxyacetone), glycerol dehydrogenase (catalyzes conversion of dihydroxyacetone to glycerol), and aldehyde dehydrogenase (ALD, e.g., converts acetaldehyde to acetate).

[0472] Modeling analysis can be used to design gene disruptions that additionally optimize utilization of the pathway. One exemplary computational method for identifying and designing metabolic alterations favoring biosynthesis of a desired product is the OptKnock computational framework, Burgard et al., 2003, Biotechnol. Bioeng. 84: 647-657.

[0473] The host cells and fermenting organisms comprising a gene disruption may be constructed using methods well known in the art, including those methods described herein. A portion of the gene can be disrupted such as the coding region or a control sequence required for expression of the coding region. Such a control sequence of the gene may be a promoter sequence or a functional part thereof, i.e., a part that is sufficient for affecting expression of the gene. For example, a promoter sequence may be inactivated resulting in no expression or a weaker promoter may be substituted for the native promoter sequence to reduce expression of the coding sequence. Other control sequences for possible modification include, but are not limited to, a leader, propeptide sequence, signal sequence, transcription terminator, and transcriptional activator.

[0474] The host cells and fermenting organisms comprising a gene disruption may be constructed by gene deletion techniques to eliminate or reduce expression of the gene. Gene deletion techniques enable the partial or complete removal of the gene thereby eliminating their expression. In such methods, deletion of the gene is accomplished by homologous recombination using a plasmid that has been constructed to contiguously contain the 5′ and 3′ regions flanking the gene.

[0475] The host cells and fermenting organisms comprising a gene disruption may also be constructed by introducing, substituting, and/or removing one or more (e.g., two, several) nucleotides in the gene or a control sequence thereof required for the transcription or translation thereof. For example, nucleotides may be inserted or removed for the introduction of a stop codon, the removal of the start codon, or a frame-shift of the open reading frame. Such a modification may be accomplished by site-directed mutagenesis or PCR generated mutagenesis in accordance with methods known in the art. See, for example, Botstein and Shortle, 1985, Science 229: 4719; Lo et al., 1985, Proc. Natl. Acad. Sci. U.S.A. 81: 2285; Higuchi et al., 1988, Nucleic Acids Res 16: 7351; Shimada, 1996, Meth. Mol. Biol. 57: 157; Ho et al., 1989, Gene 77: 61; Horton et al., 1989, Gene 77: 61; and Sarkar and Sommer, 1990, Bio Techniques 8: 404.

[0476] The host cells and fermenting organisms comprising a gene disruption may also be constructed by inserting into the gene a disruptive nucleic acid construct comprising a nucleic acid fragment homologous to the gene that will create a duplication of the region of homology and incorporate construct DNA between the duplicated regions. Such a gene disruption can eliminate gene expression if the inserted construct separates the promoter of the gene from the coding region or interrupts the coding sequence such that a non-functional gene product results. A disrupting construct may be simply a selectable marker gene accompanied by 5′ and 3′ regions homologous to the gene. The selectable marker enables identification of transformants containing the disrupted gene.

[0477] The host cells and fermenting organisms comprising a gene disruption may also be constructed by the process of gene conversion (see, for example, Iglesias and Trautner, 1983, Molecular General Genetics 189: 73-76). For example, in the gene conversion method, a nucleotide sequence corresponding to the gene is mutagenized in vitro to produce a defective nucleotide sequence, which is then transformed into the recombinant strain to produce a defective gene. By homologous recombination, the defective nucleotide sequence replaces the endogenous gene. It may be desirable that the defective nucleotide sequence also comprises a marker for selection of transformants containing the defective gene.

[0478] The host cells and fermenting organisms comprising a gene disruption may be further constructed by random or specific mutagenesis using methods well known in the art, including, but not limited to, chemical mutagenesis (see, for example, Hopwood, The Isolation of Mutants in Methods in Microbiology (J. R. Norris and D. W. Ribbons, eds.) pp. 363-433, Academic Press, New York, 1970). Modification of the gene may be performed by subjecting the parent strain to mutagenesis and screening for mutant strains in which expression of the gene has been reduced or inactivated. The mutagenesis, which may be specific or random, may be performed, for example, by use of a suitable physical or chemical mutagenizing agent, use of a suitable oligonucleotide, or subjecting the DNA sequence to PCR generated mutagenesis. Furthermore, the mutagenesis may be performed by use of any combination of these mutagenizing methods.

[0479] Examples of a physical or chemical mutagenizing agent suitable for the present purpose include ultraviolet (UV) irradiation, hydroxylamine, N-methyl-N′-nitro-N-nitrosoguanidine (MNNG), N-methyl-N′-nitrosogaunidine (NTG) O-methyl hydroxylamine, nitrous acid, ethyl methane sulphonate (EMS), sodium bisulphite, formic acid, and nucleotide analogues. When such agents are used, the mutagenesis is typically performed by incubating the parent strain to be mutagenized in the presence of the mutagenizing agent of choice under suitable conditions, and selecting for mutants exhibiting reduced or no expression of the gene.

[0480] A nucleotide sequence homologous or complementary to a gene described herein may be used from other microbial sources to disrupt the corresponding gene in a recombinant strain of choice.

[0481] In one embodiment, the modification of a gene in the recombinant cell is unmarked with a selectable marker. Removal of the selectable marker gene may be accomplished by culturing the mutants on a counter-selection medium. Where the selectable marker gene contains repeats flanking its 5′ and 3′ ends, the repeats will facilitate the looping out of the selectable marker gene by homologous recombination when the mutant strain is submitted to counter-selection. The selectable marker gene may also be removed by homologous recombination by introducing into the mutant strain a nucleic acid fragment comprising 5′ and 3′ regions of the defective gene, but lacking the selectable marker gene, followed by selecting on the counter-selection medium. By homologous recombination, the defective gene containing the selectable marker gene is replaced with the nucleic acid fragment lacking the selectable marker gene. Other methods known in the art may also be used.

### Xylose Metabolism

[0482] In one embodiment, the host cell or fermenting organism (e.g., yeast cell) further comprises a heterologous polynucleotide encoding a xylose isomerase (XI). The xylose isomerase may be any xylose isomerase that is suitable for the host cells and the methods described herein, such as a naturally occurring xylose isomerase or a variant thereof that retains xylose isomerase activity. In one embodiment, the xylose isomerase is present in the cytosol of the host cells.

[0483] In some embodiments, the host cell or fermenting organism comprising a heterologous polynucleotide encoding a xylose isomerase has an increased level of xylose isomerase activity compared to the host cells without the heterologous polynucleotide encoding the xylose isomerase, when cultivated under the same conditions. In some embodiments, the host cells or fermenting organisms have an increased level of xylose isomerase activity of at least 5%, e.g., at least 10%, at least 15%, at least 20%, at least 25%, at least 50%, at least 100%, at least 150%, at least 200%, at least 300%, or at 500% compared to the host cells without the heterologous polynucleotide encoding the xylose isomerase, when cultivated under the same conditions.

[0484] Exemplary xylose isomerases that can be used with the recombinant host cells and methods of use described herein include, but are not limited to, XIs from the fungus Piromyces sp. (WO2003/062430) or other sources (Madhavan et al., 2009, Appl Microbiol Biotechnol. 82(6), 1067-1078) have been expressed in S. cerevisiae host cells. Still other XIs suitable for expression in yeast have been described in US 2012/0184020 (an XI from Ruminococcus flavefaciens), WO2011/078262 (several XIs from Reticulitermes speratus and Mastotermes darwiniensis) and WO2012/009272 (constructs and fungal cells containing an XI from Abiotrophia defectiva). U.S. Pat. No. 8,586,336 describes a S. cerevisiae host cell expressing an XI obtained by bovine rumen fluid (shown herein as SEQ ID NO: 74).

[0485] Additional polynucleotides encoding suitable xylose isomerases may be obtained from microorganisms of any genus, including those readily available within the UniProtKB database (www.uniprot.org). In one embodiment, the xylose isomerases is a bacterial, a yeast, or a filamentous fungal xylose isomerase, e.g., obtained from any of the microorganisms described or referenced herein, as described supra.

[0486] The xylose isomerase coding sequences can also be used to design nucleic acid probes to identify and clone DNA encoding xylose isomerases from strains of different genera or species, as described supra.

[0487] The polynucleotides encoding xylose isomerases may also be identified and obtained from other sources including microorganisms isolated from nature (e.g., soil, composts, water, etc.) or DNA samples obtained directly from natural materials (e.g., soil, composts, water, etc.) as described supra.

[0488] Techniques used to isolate or clone polynucleotides encoding xylose isomerases are described supra.

[0489] In one embodiment, the xylose isomerase has a mature polypeptide sequence of having at least 60%, e.g., at least 65%, at least 70%, at least 75%, at least 80%, at least 85%, at least 90%, at least 91%, at least 92%, at least 93%, at least 94%, at least 95%, at least 96%, at least 97%, at least 98%, at least 99%, or 100% sequence identity to any xylose isomerase described or referenced herein (e.g., the xylose isomerase of SEQ ID NO: 74). In one embodiment, the xylose isomerase has a mature polypeptide sequence that differs by no more than ten amino acids, e.g., by no more than five amino acids, by no more than four amino acids, by no more than three amino acids, by no more than two amino acids, or by one amino acid from any xylose isomerase described or referenced herein (e.g., the xylose isomerase of SEQ ID NO: 74). In one embodiment, the xylose isomerase has a mature polypeptide sequence that comprises or consists of the amino acid sequence of any xylose isomerase described or referenced herein (e.g., the xylose isomerase of SEQ ID NO: 74), allelic variant, or a fragment thereof having xylose isomerase activity. In one embodiment, the xylose isomerase has an amino acid substitution, deletion, and/or insertion of one or more (e.g., two, several) amino acids. In some embodiments, the total number of amino acid substitutions, deletions and/or insertions is not more than 10, e.g., not more than 9, 8, 7, 6, 5, 4, 3, 2, or 1.

[0490] In some embodiments, the xylose isomerase has at least 20%, e.g., at least 40%, at least 50%, at least 60%, at least 70%, at least 80%, at least 90%, at least 95%, at least 96%, at least 97%, at least 98%, at least 99%, or 100% of the xylose isomerase activity of any xylose isomerase described or referenced herein (e.g., the xylose isomerase of SEQ ID NO: 74) under the same conditions.

[0491] In one embodiment, the xylose isomerase coding sequence hybridizes under at least low stringency conditions, e.g., medium stringency conditions, medium-high stringency conditions, high stringency conditions, or very high stringency conditions with the full-length complementary strand of the coding sequence from any xylose isomerase described or referenced herein (e.g., the xylose isomerase of SEQ ID NO: 74). In one embodiment, the xylose isomerase coding sequence has at least 65%, e.g., at least 70%, at least 75%, at least 80%, at least 85%, at least 85%, at least 90%, at least 91%, at least 92%, at least 93%, at least 94%, at least 95%, at least 96%, at least 97%, at least 98%, at least 99%, or 100% sequence identity with the coding sequence from any xylose isomerase described or referenced herein (e.g., the xylose isomerase of SEQ ID NO: 74).

[0492] In one embodiment, the heterologous polynucleotide encoding the xylose isomerase comprises the coding sequence of any xylose isomerase described or referenced herein (e.g., the xylose isomerase of SEQ ID NO: 74). In one embodiment, the heterologous polynucleotide encoding the xylose isomerase comprises a subsequence of the coding sequence from any xylose isomerase described or referenced herein, wherein the subsequence encodes a polypeptide having xylose isomerase activity. In one embodiment, the number of nucleotides residues in the subsequence is at least 75%, e.g., at least 80%, 85%, 90%, or 95% of the number of the referenced coding sequence.

[0493] The xylose isomerases can also include fused polypeptides or cleavable fusion polypeptides, as described supra.

[0494] In one embodiment, the host cell or fermenting organism (e.g., yeast cell) further comprises a heterologous polynucleotide encoding a xylulokinase (XK). A xylulokinase, as used herein, provides enzymatic activity for converting D-xylulose to xylulose 5-phosphate. The xylulokinase may be any xylulokinase that is suitable for the host cells and the methods described herein, such as a naturally occurring xylulokinase or a variant thereof that retains xylulokinase activity. In one embodiment, the xylulokinase is present in the cytosol of the host cells.

[0495] In some embodiments, the host cells or fermenting organisms comprising a heterologous polynucleotide encoding a xylulokinase have an increased level of xylulokinase activity compared to the host cells without the heterologous polynucleotide encoding the xylulokinase, when cultivated under the same conditions. In some embodiments, the host cells have an increased level of xylose isomerase activity of at least 5%, e.g., at least 10%, at least 15%, at least 20%, at least 25%, at least 50%, at least 100%, at least 150%, at least 200%, at least 300%, or at 500% compared to the host cells without the heterologous polynucleotide encoding the xylulokinase, when cultivated under the same conditions.

[0496] Exemplary xylulokinases that can be used with the host cells and fermenting organisms, and methods of use described herein include, but are not limited to, the Saccharomyces cerevisiae xylulokinase of SEQ ID NO: 75. Additional polynucleotides encoding suitable xylulokinases may be obtained from microorganisms of any genus, including those readily available within the UniProtKB database (www.uniprot.org). In one embodiment, the xylulokinases is a bacterial, a yeast, or a filamentous fungal xylulokinase, e.g., obtained from any of the microorganisms described or referenced herein, as described supra.

[0497] The xylulokinase coding sequences can also be used to design nucleic acid probes to identify and clone DNA encoding xylulokinases from strains of different genera or species, as described supra.

[0498] The polynucleotides encoding xylulokinases may also be identified and obtained from other sources including microorganisms isolated from nature (e.g., soil, composts, water, etc.) or DNA samples obtained directly from natural materials (e.g., soil, composts, water, etc.) as described supra.

[0499] Techniques used to isolate or clone polynucleotides encoding xylulokinases are described supra.

[0500] In one embodiment, the xylulokinase has a mature polypeptide sequence of at least 60%, e.g., at least 65%, at least 70%, at least 75%, at least 80%, at least 85%, at least 90%, at least 91%, at least 92%, at least 93%, at least 94%, at least 95%, at least 96%, at least 97%, at least 98%, at least 99%, or 100% sequence identity to any xylulokinase described or referenced herein (e.g., the Saccharomyces cerevisiae xylulokinase of SEQ ID NO: 75). In one embodiment, the xylulokinase has a mature polypeptide sequence that differs by no more than ten amino acids, e.g., by no more than five amino acids, by no more than four amino acids, by no more than three amino acids, by no more than two amino acids, or by one amino acid from any xylulokinase described or referenced herein (e.g., the Saccharomyces cerevisiae xylulokinase of SEQ ID NO: 75). In one embodiment, the xylulokinase has a mature polypeptide sequence that comprises or consists of the amino acid sequence of any xylulokinase described or referenced herein (e.g., the Saccharomyces cerevisiae xylulokinase of SEQ ID NO: 75), allelic variant, or a fragment thereof having xylulokinase activity. In one embodiment, the xylulokinase has an amino acid substitution, deletion, and/or insertion of one or more (e.g., two, several) amino acids. In some embodiments, the total number of amino acid substitutions, deletions and/or insertions is not more than 10, e.g., not more than 9, 8, 7, 6, 5, 4, 3, 2, or 1.

[0501] In some embodiments, the xylulokinase has at least 20%, e.g., at least 40%, at least 50%, at least 60%, at least 70%, at least 80%, at least 90%, at least 95%, at least 96%, at least 97%, at least 98%, at least 99%, or 100% of the xylulokinase activity of any xylulokinase described or referenced herein (e.g., the Saccharomyces cerevisiae xylulokinase of SEQ ID NO: 75) under the same conditions.

[0502] In one embodiment, the xylulokinase coding sequence hybridizes under at least low stringency conditions, e.g., medium stringency conditions, medium-high stringency conditions, high stringency conditions, or very high stringency conditions with the full-length complementary strand of the coding sequence from any xylulokinase described or referenced herein (e.g., the Saccharomyces cerevisiae xylulokinase of SEQ ID NO: 75). In one embodiment, the xylulokinase coding sequence has at least 65%, e.g., at least 70%, at least 75%, at least 80%, at least 85%, at least 85%, at least 90%, at least 91%, at least 92%, at least 93%, at least 94%, at least 95%, at least 96%, at least 97%, at least 98%, at least 99%, or 100% sequence identity with the coding sequence from any xylulokinase described or referenced herein (e.g., the Saccharomyces cerevisiae xylulokinase of SEQ ID NO: 75).

[0503] In one embodiment, the heterologous polynucleotide encoding the xylulokinase comprises the coding sequence of any xylulokinase described or referenced herein (e.g., the Saccharomyces cerevisiae xylulokinase of SEQ ID NO: 75). In one embodiment, the heterologous polynucleotide encoding the xylulokinase comprises a subsequence of the coding sequence from any xylulokinase described or referenced herein, wherein the subsequence encodes a polypeptide having xylulokinase activity. In one embodiment, the number of nucleotides residues in the subsequence is at least 75%, e.g., at least 80%, 85%, 90%, or 95% of the number of the referenced coding sequence.

[0504] The xylulokinases can also include fused polypeptides or cleavable fusion polypeptides, as described supra.

[0505] In one embodiment, the host cell or fermenting organism (e.g., yeast cell) further comprises a heterologous polynucleotide encoding a ribulose 5 phosphate 3-epimerase (RPE1). A ribulose 5 phosphate 3-epimerase, as used herein, provides enzymatic activity for converting L-ribulose 5-phosphate to L-xylulose 5-phosphate (EC 5.1.3.22). The RPE1 may be any RPE1 that is suitable for the host cells and the methods described herein, such as a naturally occurring RPE1 or a variant thereof that retains RPE1 activity. In one embodiment, the RPE1 is present in the cytosol of the host cells.

[0506] In one embodiment, the recombinant cell comprises a heterologous polynucleotide encoding a ribulose 5 phosphate 3-epimerase (RPE1), wherein the RPE1 is Saccharomyces cerevisiae RPE1, or an RPE1 having at least 60%, e.g., at least 65%, 70%, 75%, 80%, 85%, 90%, 95%, 97%, 98%, 99%, or 100% sequence identity to a Saccharomyces cerevisiae RPE1.

[0507] In one embodiment, the host cell or fermenting organism (e.g., yeast cell) further comprises a heterologous polynucleotide encoding a ribulose 5 phosphate isomerase (RKI1). A ribulose 5 phosphate isomerase, as used herein, provides enzymatic activity for converting ribose-5-phophate to ribulose 5-phosphate. The RKI1 may be any RKI1 that is suitable for the host cells and the methods described herein, such as a naturally occurring RKI1 or a variant thereof that retains RKI1 activity. In one embodiment, the RKI1 is present in the cytosol of the host cells.

[0508] In one embodiment, the host cell or fermenting organism comprises a heterologous polynucleotide encoding a ribulose 5 phosphate isomerase (RKI1), wherein the RKI1 is a Saccharomyces cerevisiae RKI1, or an RKI1 having a mature polypeptide sequence of at least 60%, e.g., at least 65%, 70%, 75%, 80%, 85%, 90%, 95%, 97%, 98%, 99%, or 100% sequence identity to a Saccharomyces cerevisiae RKI1.

[0509] In one embodiment, the host cell or fermenting organism (e.g., yeast cell) further comprises a heterologous polynucleotide encoding a transketolase (TKL1). The TKL1 may be any TKL1 that is suitable for the host cells and the methods described herein, such as a naturally occurring TKL1 or a variant thereof that retains TKL1 activity. In one embodiment, the TKL1 is present in the cytosol of the host cells.

[0510] In one embodiment, the host cell or fermenting organism comprises a heterologous polynucleotide encoding a transketolase (TKL1), wherein the TKL1 is a Saccharomyces cerevisiae TKL1, or a TKL1 having a mature polypeptide sequence of at least 60%, e.g., at least 65%, 70%, 75%, 80%, 85%, 90%, 95%, 97%, 98%, 99%, or 100% sequence identity to a Saccharomyces cerevisiae TKL1.

[0511] In one embodiment, the host cell or fermenting organism (e.g., yeast cell) further comprises a heterologous polynucleotide encoding a transaldolase (TAL1). The TAL1 may be any TAL1 that is suitable for the host cells and the methods described herein, such as a naturally occurring TAL1 or a variant thereof that retains TAL1 activity. In one embodiment, the TAL1 is present in the cytosol of the host cells.

[0512] In one embodiment, the host cell or fermenting organism comprises a heterologous polynucleotide encoding a transketolase (TAL1), wherein the TAL1 is a Saccharomyces cerevisiae TAL1, or a TAL1 having a mature polypeptide sequence of at least 60%, e.g., at least 65%, 70%, 75%, 80%, 85%, 90%, 95%, 97%, 98%, 99%, or 100% sequence identity to a Saccharomyces cerevisiae TAL1.

Methods using a Starch-Containing Material

[0513] In some embodiments, the methods described herein produce a fermentation product from a starch-containing material. Starch-containing material is well-known in the art, containing two types of homopolysaccharides (amylose and amylopectin) and is linked by alpha-(1-4)-D-glycosidic bonds. Any suitable starch-containing starting material may be used. The starting material is generally selected based on the desired fermentation product, such as ethanol. Examples of starch-containing starting materials include cereal, tubers or grains. Specifically, the starch-containing material may be corn, wheat, barley, rye, milo, sago, cassava, tapioca, sorghum, oat, rice, peas, beans, or sweet potatoes, or mixtures thereof. Contemplated are also waxy and non-waxy types of corn and barley.

[0514] In one embodiment, the starch-containing starting material is corn. In one embodiment, the starch-containing starting material is wheat. In one embodiment, the starch-containing starting material is barley. In one embodiment, the starch-containing starting material is rye. In one embodiment, the starch-containing starting material is milo. In one embodiment, the starch-containing starting material is sago. In one embodiment, the starch-containing starting material is cassava. In one embodiment, the starch-containing starting material is tapioca. In one embodiment, the starch-containing starting material is sorghum. In one embodiment, the starch-containing starting material is rice. In one embodiment, the starch-containing starting material is peas. In one embodiment, the starch-containing starting material is beans. In one embodiment, the starch-containing starting material is sweet potatoes. In one embodiment, the starch-containing starting material is oats.

[0515] The methods using a starch-containing material may include a conventional process (e.g., including a liquefaction step described in more detail below) or a raw starch hydrolysis process. In some embodiments using a starch-containing material, saccharification of the starch-containing material is at a temperature above the initial gelatinization temperature. In some embodiments using a starch-containing material, saccharification of the starch-containing material is at a temperature below the initial gelatinization temperature.

### Liquefaction

[0516] In embodiments using a starch-containing material, the methods may further comprise a liquefaction step carried out by subjecting the starch-containing material at a temperature above the initial gelatinization temperature to an alpha-amylase and optionally a protease and/or a glucoamylase. Other enzymes such as a pullulanase and phytase may also be present and/or added in liquefaction. In some embodiments, the liquefaction step is carried out prior to steps a) and b) of the described methods.

[0517] Liquefaction step may be carried out for 0.5-5 hours, such as 1-3 hours, such as typically about 2 hours.

[0518] The term “initial gelatinization temperature” means the lowest temperature at which gelatinization of the starch-containing material commences. In general, starch heated in water begins to gelatinize between about 50° C. and 75° C.; the exact temperature of gelatinization depends on the specific starch and can readily be determined by the skilled artisan. Thus, the initial gelatinization temperature may vary according to the plant species, to the particular variety of the plant species as well as with the growth conditions. The initial gelatinization temperature of a given starch-containing material may be determined as the temperature at which birefringence is lost in 5% of the starch granules using the method described by Gorinstein and Lii, 1992, Starch/Stärke 44(12): 461-466.

[0519] Liquefaction is typically carried out at a temperature in the range from 70-100° C. In one embodiment, the temperature in liquefaction is between 75-95° C., such as between 75-90° C., between 80-90° C., or between 82-88° C., such as about 85° C.

[0520] A jet-cooking step may be carried out prior to liquefaction in step, for example, at a temperature between 110-145° C., 120-140° C., 125-135° C., or about 130° C. for about 1-15 minutes, for about 3-10 minutes, or about 5 minutes.

[0521] The pH during liquefaction may be between 4 and 7, such as pH 4.5-6.5, pH 5.0-6.5, pH 5.0-6.0, pH 5.2-6.2, or about 5.2, about 5.4, about 5.6, or about 5.8.

[0522] In one embodiment, the process further comprises, prior to liquefaction, the steps of:

[0523] i) reducing the particle size of the starch-containing material, preferably by dry milling;

[0524] ii) forming a slurry comprising the starch-containing material and water.

[0525] The starch-containing starting material, such as whole grains, may be reduced in particle size, e.g., by milling, in order to open up the structure, to increase surface area, and allowing for further processing. Generally, there are two types of processes: wet and dry milling. In dry milling whole kernels are milled and used. Wet milling gives a good separation of germ and meal (starch granules and protein). Wet milling is often applied at locations where the starch hydrolysate is used in production of, e.g., syrups. Both dry milling and wet milling are well known in the art of starch processing. In one embodiment the starch-containing material is subjected to dry milling. In one embodiment, the particle size is reduced to between 0.05 to 3.0 mm, e.g., 0.1-0.5 mm, or so that at least 30%, at least 50%, at least 70%, or at least 90% of the starch-containing material fit through a sieve with a 0.05 to 3.0 mm screen, e.g., 0.1-0.5 mm screen. In another embodiment, at least 50%, e.g., at least 70%, at least 80%, or at least 90% of the starch-containing material fit through a sieve with #6 screen.

[0526] The aqueous slurry may contain from 10-55 w/w-% dry solids (DS), e.g., 25-45 w/w-% dry solids (DS), or 30-40 w/w-% dry solids (DS) of starch-containing material.

[0527] The alpha-amylase, optionally a protease, and optionally a glucoamylase may initially be added to the aqueous slurry to initiate liquefaction (thinning). In one embodiment, only a portion of the enzymes (e.g., about ⅓) is added to the aqueous slurry, while the rest of the enzymes (e.g., about ⅔) are added during liquefaction step.

[0528] A non-exhaustive list of alpha-amylases used in liquefaction can be found in the “Alpha-Amylases” section. Examples of suitable proteases used in liquefaction include any protease described supra in the “Proteases” section. Examples of suitable glucoamylases used in liquefaction include any glucoamylase found in the “Glucoamylases” section.

### Saccharification and Fermentation of Starch-Containing Material

[0529] In embodiments using a starch-containing material, a glucoamylase may be present and/or added in saccharification step a) and/or fermentation step b) or simultaneous saccharification and fermentation (SSF). The glucoamylase of the saccharification step a) and/or fermentation step b) or simultaneous saccharification and fermentation (SSF) is typically different from the glucoamylase optionally added to any liquefaction step described supra. In one embodiment, the glucoamylase is present and/or added together with a fungal alpha-amylase.

[0530] In some embodiments, the host cell or fermenting organism comprises a heterologous polynucleotide encoding a glucoamylase, for example, as described in WO2017/087330, the content of which is hereby incorporated by reference.

[0531] Examples of glucoamylases can be found in the “Glucoamylases” section.

[0532] When doing sequential saccharification and fermentation, saccharification step a) may be carried out under conditions well-known in the art. For instance, saccharification step a) may last up to from about 24 to about 72 hours. In one embodiment, pre-saccharification is done. Pre-saccharification is typically done for 40-90 minutes at a temperature between 30-65° C., typically about 60° C. Pre-saccharification is, in one embodiment, followed by saccharification during fermentation in simultaneous saccharification and fermentation (SSF). Saccharification is typically carried out at temperatures from 20-75° C., preferably from 40-70° C., typically about 60° C., and typically at a pH between 4 and 5, such as about pH 4.5.

[0533] Fermentation is carried out in a fermentation medium, as known in the art and, e.g., as described herein. The fermentation medium includes the fermentation substrate, that is, the carbohydrate source that is metabolized by the fermenting organism. With the processes described herein, the fermentation medium may comprise nutrients and growth stimulator(s) for the fermenting organism(s). Nutrient and growth stimulators are widely used in the art of fermentation and include nitrogen sources, such as ammonia; urea, vitamins and minerals, or combinations thereof.

[0534] Generally, fermenting organisms such as yeast, including Saccharomyces cerevisiae yeast, require an adequate source of nitrogen for propagation and fermentation. Many sources of supplemental nitrogen, if necessary, can be used and such sources of nitrogen are well known in the art. The nitrogen source may be organic, such as urea, DDGs, wet cake or corn mash, or inorganic, such as ammonia or ammonium hydroxide. In one embodiment, the nitrogen source is urea.

[0535] Fermentation can be carried out under low nitrogen conditions, e.g., when using a protease-expressing yeast. In some embodiments, the fermentation step is conducted with less than 1000 ppm supplemental nitrogen (e.g., urea or ammonium hydroxide), such as less than 750 ppm, less than 500 ppm, less than 400 ppm, less than 300 ppm, less than 250 ppm, less than 200 ppm, less than 150 ppm, less than 100 ppm, less than 75 ppm, less than 50 ppm, less than 25 ppm, or less than 10 ppm, supplemental nitrogen. In some embodiments, the fermentation step is conducted with no supplemental nitrogen.

[0536] Simultaneous saccharification and fermentation (“SSF”) is widely used in industrial scale fermentation product production processes, especially ethanol production processes. When doing SSF the saccharification step a) and the fermentation step b) are carried out simultaneously. There is no holding stage for the saccharification, meaning that a fermenting organism, such as yeast, and enzyme(s), may be added together. However, it is also contemplated to add the fermenting organism and enzyme(s) separately. SSF is typically carried out at a temperature from 25° C. to 40° C., such as from 28° C. to 35° C., such as from 30° C. to 34° C., or about 32° C. In one embodiment, fermentation is ongoing for 6 to 120 hours, in particular 24 to 96 hours. In one embodiment, the pH is between 4-5.

[0537] In one embodiment, a cellulolytic enzyme composition is present and/or added in saccharification, fermentation or simultaneous saccharification and fermentation (SSF). Examples of such cellulolytic enzyme compositions can be found in the “Cellulolytic Enzymes and Compositions” section. The cellulolytic enzyme composition may be present and/or added together with a glucoamylase, such as one disclosed in the “Glucoamylases” section.

Methods using a Cellulosic-Containing Material

[0538] In some embodiments, the methods described herein produce a fermentation product from a cellulosic-containing material. The predominant polysaccharide in the primary cell wall of biomass is cellulose, the second most abundant is hemicellulose, and the third is pectin. The secondary cell wall, produced after the cell has stopped growing, also contains polysaccharides and is strengthened by polymeric lignin covalently cross-linked to hemicellulose. Cellulose is a homopolymer of anhydrocellobiose and thus a linear beta-(1-4)-D-glucan, while hemicelluloses include a variety of compounds, such as xylans, xyloglucans, arabinoxylans, and mannans in complex branched structures with a spectrum of substituents. Although generally polymorphous, cellulose is found in plant tissue primarily as an insoluble crystalline matrix of parallel glucan chains. Hemicelluloses usually hydrogen bond to cellulose, as well as to other hemicelluloses, which help stabilize the cell wall matrix.

[0539] Cellulose is generally found, for example, in the stems, leaves, hulls, husks, and cobs of plants or leaves, branches, and wood of trees. The cellulosic-containing material can be, but is not limited to, agricultural residue, herbaceous material (including energy crops), municipal solid waste, pulp and paper mill residue, waste paper, and wood (including forestry residue) (see, for example, Wiselogel et al., 1995, in Handbook on Bioethanol (Charles E. Wyman, editor), pp. 105-118, Taylor & Francis, Washington D.C.; Wyman, 1994, Bioresource Technology 50: 3-16; Lynd, 1990, Applied Biochemistry and Biotechnology 24/25: 695-719; Mosier et al., 1999, Recent Progress in Bioconversion of Lignocellulosics, in Advances in Biochemical Engineering/Biotechnology, T. Scheper, managing editor, Volume 65, pp. 23-40, Springer-Verlag, New York). It is understood herein that the cellulose may be in the form of lignocellulose, a plant cell wall material containing lignin, cellulose, and hemicellulose in a mixed matrix. In one embodiment, the cellulosic-containing material is any biomass material. In another embodiment, the cellulosic-containing material is lignocellulose, which comprises cellulose, hemicelluloses, and lignin.

[0540] In one embodiment, the cellulosic-containing material is agricultural residue, herbaceous material (including energy crops), municipal solid waste, pulp and paper mill residue, waste paper, or wood (including forestry residue).

[0541] In another embodiment, the cellulosic-containing material is arundo, bagasse, bamboo, corn cob, corn fiber, corn stover, miscanthus, rice straw, switchgrass, or wheat straw.

[0542] In another embodiment, the cellulosic-containing material is aspen, eucalyptus, fir, pine, poplar, spruce, or willow.

[0543] In another embodiment, the cellulosic-containing material is algal cellulose, bacterial cellulose, cotton linter, filter paper, microcrystalline cellulose (e.g., AVICEL®), or phosphoric-acid treated cellulose.

[0544] In another embodiment, the cellulosic-containing material is an aquatic biomass. As used herein the term “aquatic biomass” means biomass produced in an aquatic environment by a photosynthesis process. The aquatic biomass can be algae, emergent plants, floating-leaf plants, or submerged plants.

[0545] The cellulosic-containing material may be used as is or may be subjected to pretreatment, using conventional methods known in the art, as described herein. In a preferred embodiment, the cellulosic-containing material is pretreated.

[0546] The methods of using cellulosic-containing material can be accomplished using methods conventional in the art. Moreover, the methods of can be implemented using any conventional biomass processing apparatus configured to carry out the processes.

### Cellulosic Pretreatment

[0547] In one embodiment the cellulosic-containing material is pretreated before saccharification.

[0548] In practicing the processes described herein, any pretreatment process known in the art can be used to disrupt plant cell wall components of the cellulosic-containing material (Chandra et al., 2007, Adv. Biochem. Engin./Biotechnol. 108: 67-93; Galbe and Zacchi, 2007, Adv. Biochem. Engin./Biotechnol. 108: 41-65; Hendriks and Zeeman, 2009, Bioresource Technology 100: 10-18; Mosier et al., 2005, Bioresource Technology 96: 673-686; Taherzadeh and Karimi, 2008, Int. J. Mol. Sci. 9: 1621-1651; Yang and Wyman, 2008, Biofuels Bioproducts and Biorefining-Biofpr. 2: 26-40).

[0549] The cellulosic-containing material can also be subjected to particle size reduction, sieving, pre-soaking, wetting, washing, and/or conditioning prior to pretreatment using methods known in the art.

[0550] Conventional pretreatments include, but are not limited to, steam pretreatment (with or without explosion), dilute acid pretreatment, hot water pretreatment, alkaline pretreatment, lime pretreatment, wet oxidation, wet explosion, ammonia fiber explosion, organosolv pretreatment, and biological pretreatment. Additional pretreatments include ammonia percolation, ultrasound, electroporation, microwave, supercritical CO₂, supercritical H₂O, ozone, ionic liquid, and gamma irradiation pretreatments.

[0551] In a one embodiment, the cellulosic-containing material is pretreated before saccharification (i.e., hydrolysis) and/or fermentation. Pretreatment is preferably performed prior to the hydrolysis. Alternatively, the pretreatment can be carried out simultaneously with enzyme hydrolysis to release fermentable sugars, such as glucose, xylose, and/or cellobiose. In most cases the pretreatment step itself results in some conversion of biomass to fermentable sugars (even in absence of enzymes).

[0552] In one embodiment, the cellulosic-containing material is pretreated with steam. In steam pretreatment, the cellulosic-containing material is heated to disrupt the plant cell wall components, including lignin, hemicellulose, and cellulose to make the cellulose and other fractions, e.g., hemicellulose, accessible to enzymes. The cellulosic-containing material is passed to or through a reaction vessel where steam is injected to increase the temperature to the required temperature and pressure and is retained therein for the desired reaction time. Steam pretreatment is preferably performed at 140-250° C., e.g., 160-200° C. or 170-190° C., where the optimal temperature range depends on optional addition of a chemical catalyst. Residence time for the steam pretreatment is preferably 1-60 minutes, e.g., 1-30 minutes, 1-20 minutes, 3-12 minutes, or 4-10 minutes, where the optimal residence time depends on the temperature and optional addition of a chemical catalyst. Steam pretreatment allows for relatively high solids loadings, so that the cellulosic-containing material is generally only moist during the pretreatment. The steam pretreatment is often combined with an explosive discharge of the material after the pretreatment, which is known as steam explosion, that is, rapid flashing to atmospheric pressure and turbulent flow of the material to increase the accessible surface area by fragmentation (Duff and Murray, 1996, Bioresource Technology 855: 1-33; Galbe and Zacchi, 2002, Appl. Microbiol. Biotechnol. 59: 618-628; U.S. Patent Application No. 2002/0164730). During steam pretreatment, hemicellulose acetyl groups are cleaved and the resulting acid autocatalyzes partial hydrolysis of the hemicellulose to monosaccharides and oligosaccharides. Lignin is removed to only a limited extent.

[0553] In one embodiment, the cellulosic-containing material is subjected to a chemical pretreatment. The term “chemical treatment” refers to any chemical pretreatment that promotes the separation and/or release of cellulose, hemicellulose, and/or lignin. Such a pretreatment can convert crystalline cellulose to amorphous cellulose. Examples of suitable chemical pretreatment processes include, for example, dilute acid pretreatment, lime pretreatment, wet oxidation, ammonia fiber/freeze expansion (AFEX), ammonia percolation (APR), ionic liquid, and organosolv pretreatments.

[0554] A chemical catalyst such as H₂SO₄ or SO₂ (typically 0.3 to 5% w/w) is sometimes added prior to steam pretreatment, which decreases the time and temperature, increases the recovery, and improves enzymatic hydrolysis (Ballesteros et al., 2006, Appl. Biochem. Biotechnol. 129-132: 496-508; Varga et al., 2004, Appl. Biochem. Biotechnol. 113-116: 509-523; Sassner et al., 2006, Enzyme Microb. Technol. 39: 756-762). In dilute acid pretreatment, the cellulosic-containing material is mixed with dilute acid, typically H₂SO₄, and water to form a slurry, heated by steam to the desired temperature, and after a residence time flashed to atmospheric pressure. The dilute acid pretreatment can be performed with a number of reactor designs, e.g., plug-flow reactors, counter-current reactors, or continuous counter-current shrinking bed reactors (Duff and Murray, 1996, Bioresource Technology 855: 1-33; Schell et al., 2004, Bioresource Technology 91: 179-188; Lee et al., 1999, Adv. Biochem. Eng. Biotechnol. 65: 93-115). In a specific embodiment the dilute acid pretreatment of cellulosic-containing material is carried out using 4% w/w sulfuric acid at 180° C. for 5 minutes.

[0555] Several methods of pretreatment under alkaline conditions can also be used. These alkaline pretreatments include, but are not limited to, sodium hydroxide, lime, wet oxidation, ammonia percolation (APR), and ammonia fiber/freeze expansion (AFEX) pretreatment. Lime pretreatment is performed with calcium oxide or calcium hydroxide at temperatures of 85-150° C. and residence times from 1 hour to several days (Wyman et al., 2005, Bioresource Technology 96: 1959-1966; Mosier et al., 2005, Bioresource Technology 96: 673-686). WO2006/110891, WO2006/110899, WO2006/110900, and WO2006/110901 disclose pretreatment methods using ammonia.

[0556] Wet oxidation is a thermal pretreatment performed typically at 180-200° C. for 5-15 minutes with addition of an oxidative agent such as hydrogen peroxide or over-pressure of oxygen (Schmidt and Thomsen, 1998, Bioresource Technology 64: 139-151; Palonen et al., 2004, Appl. Biochem. Biotechnol. 117: 1-17; Varga et al., 2004, Biotechnol. Bioeng. 88: 567-574; Martin et al., 2006, J. Chem. Technol. Biotechnol. 81: 1669-1677). The pretreatment is performed preferably at 1-40% dry matter, e.g., 2-30% dry matter or 5-20% dry matter, and often the initial pH is increased by the addition of alkali such as sodium carbonate.

[0557] A modification of the wet oxidation pretreatment method, known as wet explosion (combination of wet oxidation and steam explosion) can handle dry matter up to 30%. In wet explosion, the oxidizing agent is introduced during pretreatment after a certain residence time. The pretreatment is then ended by flashing to atmospheric pressure (WO 2006/032282).

[0558] Ammonia fiber expansion (AFEX) involves treating the cellulosic-containing material with liquid or gaseous ammonia at moderate temperatures such as 90-150° C. and high pressure such as 17-20 bar for 5-10 minutes, where the dry matter content can be as high as 60% (Gollapalli et al., 2002, Appl. Biochem. Biotechnol. 98: 23-35; Chundawat et al., 2007, Biotechnol. Bioeng. 96: 219-231; Alizadeh et al., 2005, Appl. Biochem. Biotechnol. 121: 1133-1141; Teymouri et al., 2005, Bioresource Technology 96: 2014-2018). During AFEX pretreatment cellulose and hemicelluloses remain relatively intact. Lignin-carbohydrate complexes are cleaved.

[0559] Organosolv pretreatment delignifies the cellulosic-containing material by extraction using aqueous ethanol (40-60% ethanol) at 160-200° C. for 30-60 minutes (Pan et al., 2005, Biotechnol. Bioeng. 90: 473-481; Pan et al., 2006, Biotechnol. Bioeng. 94: 851-861; Kurabi et al., 2005, Appl. Biochem. Biotechnol. 121: 219-230). Sulphuric acid is usually added as a catalyst. In organosolv pretreatment, the majority of hemicellulose and lignin is removed.

[0560] Other examples of suitable pretreatment methods are described by Schell et al., 2003, Appl. Biochem. Biotechnol. 105-108: 69-85, and Mosier et al., 2005, Bioresource Technology 96: 673-686, and U.S. Published Application 2002/0164730.

[0561] In one embodiment, the chemical pretreatment is carried out as a dilute acid treatment, and more preferably as a continuous dilute acid treatment. The acid is typically sulfuric acid, but other acids can also be used, such as acetic acid, citric acid, nitric acid, phosphoric acid, tartaric acid, succinic acid, hydrogen chloride, or mixtures thereof. Mild acid treatment is conducted in the pH range of preferably 1-5, e.g., 1-4 or 1-2.5. In one embodiment, the acid concentration is in the range from preferably 0.01 to 10 wt. % acid, e.g., 0.05 to 5 wt. % acid or 0.1 to 2 wt. % acid. The acid is contacted with the cellulosic-containing material and held at a temperature in the range of preferably 140-200° C., e.g., 165-190° C., for periods ranging from 1 to 60 minutes.

[0562] In another embodiment, pretreatment takes place in an aqueous slurry. In preferred embodiments, the cellulosic-containing material is present during pretreatment in amounts preferably between 10-80 wt. %, e.g., 20-70 wt. % or 30-60 wt. %, such as around 40 wt. %. The pretreated cellulosic-containing material can be unwashed or washed using any method known in the art, e.g., washed with water.

[0563] In one embodiment, the cellulosic-containing material is subjected to mechanical or physical pretreatment. The term “mechanical pretreatment” or “physical pretreatment” refers to any pretreatment that promotes size reduction of particles. For example, such pretreatment can involve various types of grinding or milling (e.g., dry milling, wet milling, or vibratory ball milling).

[0564] The cellulosic-containing material can be pretreated both physically (mechanically) and chemically. Mechanical or physical pretreatment can be coupled with steaming/steam explosion, hydrothermolysis, dilute or mild acid treatment, high temperature, high pressure treatment, irradiation (e.g., microwave irradiation), or combinations thereof. In one embodiment, high pressure means pressure in the range of preferably about 100 to about 400 psi, e.g., about 150 to about 250 psi. In another embodiment, high temperature means temperature in the range of about 100 to about 300° C., e.g., about 140 to about 200° C. In a preferred embodiment, mechanical or physical pretreatment is performed in a batch-process using a steam gun hydrolyzer system that uses high pressure and high temperature as defined above, e.g., a Sunds Hydrolyzer available from Sunds Defibrator AB, Sweden. The physical and chemical pretreatments can be carried out sequentially or simultaneously, as desired.

[0565] Accordingly, in one embodiment, the cellulosic-containing material is subjected to physical (mechanical) or chemical pretreatment, or any combination thereof, to promote the separation and/or release of cellulose, hemicellulose, and/or lignin.

[0566] In one embodiment, the cellulosic-containing material is subjected to a biological pretreatment. The term “biological pretreatment” refers to any biological pretreatment that promotes the separation and/or release of cellulose, hemicellulose, and/or lignin from the cellulosic-containing material. Biological pretreatment techniques can involve applying lignin-solubilizing microorganisms and/or enzymes (see, for example, Hsu, T.-A., 1996, Pretreatment of biomass, in Handbook on Bioethanol: Production and Utilization, Wyman, C. E., ed., Taylor & Francis, Washington, D.C., 179-212; Ghosh and Singh, 1993, Adv. Appl. Microbiol. 39: 295-333; McMillan, J. D., 1994, Pretreating lignocellulosic biomass: a review, in Enzymatic Conversion of Biomass for Fuels Production, Himmel, M. E., Baker, J. O., and Overend, R. P., eds., ACS Symposium Series 566, American Chemical Society, Washington, D.C., chapter 15; Gong, C. S., Cao, N. J., Du, J., and Tsao, G. T., 1999, Ethanol production from renewable resources, in Advances in Biochemical Engineering/Biotechnology, Scheper, T., ed., Springer-Verlag Berlin Heidelberg, Germany, 65: 207-241; Olsson and Hahn-Hagerdal, 1996, Enz. Microb. Tech. 18: 312-331; and Vallander and Eriksson, 1990, Adv. Biochem. Eng./Biotechnol. 42: 63-95).

### Saccharification and Fermentation of Cellulosic-Containing Material

[0567] Saccharification (i.e., hydrolysis) and fermentation, separate or simultaneous, include, but are not limited to, separate hydrolysis and fermentation (SHF); simultaneous saccharification and fermentation (SSF); simultaneous saccharification and co-fermentation (SSCF); hybrid hydrolysis and fermentation (HHF); separate hydrolysis and co-fermentation (SHCF); hybrid hydrolysis and co-fermentation (HHCF).

[0568] SHF uses separate process steps to first enzymatically hydrolyze the cellulosic-containing material to fermentable sugars, e.g., glucose, cellobiose, and pentose monomers, and then ferment the fermentable sugars to ethanol. In SSF, the enzymatic hydrolysis of the cellulosic-containing material and the fermentation of sugars to ethanol are combined in one step (Philippidis, G. P., 1996, Cellulose bioconversion technology, in Handbook on Bioethanol: Production and Utilization, Wyman, C. E., ed., Taylor & Francis, Washington, D.C., 179-212). SSCF involves the co-fermentation of multiple sugars (Sheehan and Himmel, 1999, Biotechnol. Prog. 15: 817-827). HHF involves a separate hydrolysis step, and in addition a simultaneous saccharification and hydrolysis step, which can be carried out in the same reactor. The steps in an HHF process can be carried out at different temperatures, i.e., high temperature enzymatic saccharification followed by SSF at a lower temperature that the fermentation organism can tolerate. It is understood herein that any method known in the art comprising pretreatment, enzymatic hydrolysis (saccharification), fermentation, or a combination thereof, can be used in the practicing the processes described herein.

[0569] A conventional apparatus can include a fed-batch stirred reactor, a batch stirred reactor, a continuous flow stirred reactor with ultrafiltration, and/or a continuous plug-flow column reactor (de Castilhos Corazza et al., 2003, Acta Scientiarum. Technology 25: 33-38; Gusakov and Sinitsyn, 1985, Enz. Microb. Technol. 7: 346-352), an attrition reactor (Ryu and Lee, 1983, Biotechnol. Bioeng. 25: 53-65). Additional reactor types include fluidized bed, upflow blanket, immobilized, and extruder type reactors for hydrolysis and/or fermentation.

[0570] In the saccharification step (i.e., hydrolysis step), the cellulosic and/or starch-containing material, e.g., pretreated, is hydrolyzed to break down cellulose, hemicellulose, and/or starch to fermentable sugars, such as glucose, cellobiose, xylose, xylulose, arabinose, mannose, galactose, and/or soluble oligosaccharides. The hydrolysis is performed enzymatically e.g., by a cellulolytic enzyme composition. The enzymes of the compositions can be added simultaneously or sequentially.

[0571] Enzymatic hydrolysis may be carried out in a suitable aqueous environment under conditions that can be readily determined by one skilled in the art. In one embodiment, hydrolysis is performed under conditions suitable for the activity of the enzymes(s), i.e., optimal for the enzyme(s). The hydrolysis can be carried out as a fed batch or continuous process where the cellulosic and/or starch-containing material is fed gradually to, for example, an enzyme containing hydrolysis solution.

[0572] The saccharification is generally performed in stirred-tank reactors or fermentors under controlled pH, temperature, and mixing conditions. Suitable process time, temperature and pH conditions can readily be determined by one skilled in the art. For example, the saccharification can last up to 200 hours, but is typically performed for preferably about 12 to about 120 hours, e.g., about 16 to about 72 hours or about 24 to about 48 hours. The temperature is in the range of preferably about 25° C. to about 70° C., e.g., about 30° C. to about 65° C., about 40° C. to about 60° C., or about 50° C. to about 55° C. The pH is in the range of preferably about 3 to about 8, e.g., about 3.5 to about 7, about 4 to about 6, or about 4.5 to about 5.5. The dry solids content is in the range of preferably about 5 to about 50 wt. %, e.g., about 10 to about 40 wt. % or about 20 to about 30 wt. %.

[0573] Saccharification in may be carried out using a cellulolytic enzyme composition. Such enzyme compositions are described below in the “Cellulolytic Enzyme Composition”-section below. The cellulolytic enzyme compositions can comprise any protein useful in degrading the cellulosic-containing material. In one embodiment, the cellulolytic enzyme composition comprises or further comprises one or more (e.g., several) proteins selected from the group consisting of a cellulase, an AA9 (GH61) polypeptide, a hemicellulase, an esterase, an expansin, a ligninolytic enzyme, an oxidoreductase, a pectinase, a protease, and a swollenin.

[0574] In another embodiment, the cellulase is preferably one or more (e.g., several) enzymes selected from the group consisting of an endoglucanase, a cellobiohydrolase, and a beta-glucosidase.

[0575] In another embodiment, the hemicellulase is preferably one or more (e.g., several) enzymes selected from the group consisting of an acetylmannan esterase, an acetylxylan esterase, an arabinanase, an arabinofuranosidase, a coumaric acid esterase, a feruloyl esterase, a galactosidase, a glucuronidase, a glucuronoyl esterase, a mannanase, a mannosidase, a xylanase, and a xylosidase. In another embodiment, the oxidoreductase is one or more (e.g., several) enzymes selected from the group consisting of a catalase, a laccase, and a peroxidase.

[0576] The enzymes or enzyme compositions used in a processes of the present invention may be in any form suitable for use, such as, for example, a fermentation broth formulation or a cell composition, a cell lysate with or without cellular debris, a semi-purified or purified enzyme preparation, or a host cell as a source of the enzymes. The enzyme composition may be a dry powder or granulate, a non-dusting granulate, a liquid, a stabilized liquid, or a stabilized protected enzyme. Liquid enzyme preparations may, for instance, be stabilized by adding stabilizers such as a sugar, a sugar alcohol or another polyol, and/or lactic acid or another organic acid according to established processes.

[0577] In one embodiment, an effective amount of cellulolytic or hemicellulolytic enzyme composition to the cellulosic-containing material is about 0.5 to about 50 mg, e.g., about 0.5 to about 40 mg, about 0.5 to about 25 mg, about 0.75 to about 20 mg, about 0.75 to about 15 mg, about 0.5 to about 10 mg, or about 2.5 to about 10 mg per g of the cellulosic-containing material.

[0578] In one embodiment, such a compound is added at a molar ratio of the compound to glucosyl units of cellulose of about 10⁻⁶ to about 10, e.g., about 10⁻⁶ to about 7.5, about 10⁻⁶ to about 5, about 10⁻⁶ to about 2.5, about 10⁻⁶ to about 1, about 10⁻⁵ to about 1, about 10⁻⁵ to about 10⁻¹, about 10⁻⁴ to about 10⁻¹, about 10⁻³ to about 10⁻¹, or about 10⁻³ to about 10⁻². In another embodiment, an effective amount of such a compound is about 0.1 μM to about 1 M, e.g., about 0.5 μM to about 0.75 M, about 0.75 μM to about 0.5 M, about 1 μM to about 0.25 M, about 1 μM to about 0.1 M, about 5 μM to about 50 mM, about 10 μM to about 25 mM, about 50 μM to about 25 mM, about 10 μM to about 10 mM, about 5 μM to about 5 mM, or about 0.1 mM to about 1 mM.

[0579] The term “liquor” means the solution phase, either aqueous, organic, or a combination thereof, arising from treatment of a lignocellulose and/or hemicellulose material in a slurry, or monosaccharides thereof, e.g., xylose, arabinose, mannose, etc. under conditions as described in WO2012/021401, and the soluble contents thereof. A liquor for cellulolytic enhancement of an AA9 polypeptide (GH61 polypeptide) can be produced by treating a lignocellulose or hemicellulose material (or feedstock) by applying heat and/or pressure, optionally in the presence of a catalyst, e.g., acid, optionally in the presence of an organic solvent, and optionally in combination with physical disruption of the material, and then separating the solution from the residual solids. Such conditions determine the degree of cellulolytic enhancement obtainable through the combination of liquor and an AA9 polypeptide during hydrolysis of a cellulosic substrate by a cellulolytic enzyme preparation. The liquor can be separated from the treated material using a method standard in the art, such as filtration, sedimentation, or centrifugation.

[0580] In one embodiment, an effective amount of the liquor to cellulose is about 10⁻⁶ to about 10 g per g of cellulose, e.g., about 10⁻⁶ to about 7.5 g, about 10⁻⁶ to about 5 g, about 10⁻⁶ to about 2.5 g, about 10⁻⁶ to about 1 g, about 10⁻⁵ to about 1 g, about 10⁻⁵ to about 10⁻¹ g, about 10⁻⁴ to about 10⁻¹ g, about 10⁻³ to about 10⁻¹ g, or about 10⁻³ to about 10⁻² g per g of cellulose.

[0581] In the fermentation step, sugars, released from the cellulosic-containing material, e.g., as a result of the pretreatment and enzymatic hydrolysis steps, are fermented to ethanol, by a host cell or fermenting organism, such as yeast described herein. Hydrolysis (saccharification) and fermentation can be separate or simultaneous.

[0582] Any suitable hydrolyzed cellulosic-containing material can be used in the fermentation step in practicing the processes described herein. Such feedstocks include, but are not limited to carbohydrates (e.g., lignocellulose, xylans, cellulose, starch, etc.). The material is generally selected based on economics, i.e., costs per equivalent sugar potential, and recalcitrance to enzymatic conversion.

[0583] Production of ethanol by a host cell or fermenting organism using cellulosic-containing material results from the metabolism of sugars (monosaccharides). The sugar composition of the hydrolyzed cellulosic-containing material and the ability of the host cell or fermenting organism to utilize the different sugars has a direct impact in process yields. Prior to Applicant's disclosure herein, strains known in the art utilize glucose efficiently but do not (or very limitedly) metabolize pentoses like xylose, a monosaccharide commonly found in hydrolyzed material.

[0584] Compositions of the fermentation media and fermentation conditions depend on the host cell or fermenting organism and can easily be determined by one skilled in the art. Typically, the fermentation takes place under conditions known to be suitable for generating the fermentation product. In some embodiments, the fermentation process is carried out under aerobic or microaerophilic (i.e., where the concentration of oxygen is less than that in air), or anaerobic conditions. In some embodiments, fermentation is conducted under anaerobic conditions (i.e., no detectable oxygen), or less than about 5, about 2.5, or about 1 mmol/L/h oxygen. In the absence of oxygen, the NADH produced in glycolysis cannot be oxidized by oxidative phosphorylation. Under anaerobic conditions, pyruvate or a derivative thereof may be utilized by the host cell as an electron and hydrogen acceptor in order to generate NAD+.

[0585] The fermentation process is typically run at a temperature that is optimal for the recombinant fungal cell. For example, in some embodiments, the fermentation process is performed at a temperature in the range of from about 25° C. to about 42° C. Typically the process is carried out a temperature that is less than about 38° C., less than about 35° C., less than about 33° C., or less than about 38° C., but at least about 20° C., 22° C., or 25° C.

[0586] A fermentation stimulator can be used in a process described herein to further improve the fermentation, and in particular, the performance of the host cell or fermenting organism, such as, rate enhancement and product yield (e.g., ethanol yield). A “fermentation stimulator” refers to stimulators for growth of the host cells and fermenting organisms, in particular, yeast. Preferred fermentation stimulators for growth include vitamins and minerals. Examples of vitamins include multivitamins, biotin, pantothenate, nicotinic acid, meso-inositol, thiamine, pyridoxine, para-aminobenzoic acid, folic acid, riboflavin, and Vitamins A, B, C, D, and E. See, for example, Alfenore et al., Improving ethanol production and viability of Saccharomyces cerevisiae by a vitamin feeding strategy during fed-batch process, Springer-Verlag (2002), which is hereby incorporated by reference. Examples of minerals include minerals and mineral salts that can supply nutrients comprising P, K, Mg, S, Ca, Fe, Zn, Mn, and Cu.

### Cellulolytic Enzymes and Compositions

[0587] A cellulolytic enzyme or cellulolytic enzyme composition may be present and/or added during saccharification. A cellulolytic enzyme composition is an enzyme preparation containing one or more (e.g., several) enzymes that hydrolyze cellulosic-containing material. Such enzymes include endoglucanase, cellobiohydrolase, beta-glucosidase, and/or combinations thereof.

[0588] In some embodiments, the host cell or fermenting organism comprises one or more (e.g., several) heterologous polynucleotides encoding enzymes that hydrolyze cellulosic-containing material (e.g., an endoglucanase, cellobiohydrolase, beta-glucosidase or combinations thereof). Any enzyme described or referenced herein that hydrolyzes cellulosic-containing material is contemplated for expression in the host cell or fermenting organism.

[0589] The cellulolytic enzyme may be any cellulolytic enzyme that is suitable for the host cells and/or the methods described herein (e.g., an endoglucanase, cellobiohydrolase, beta-glucosidase), such as a naturally occurring cellulolytic enzyme or a variant thereof that retains cellulolytic enzyme activity.

[0590] In some embodiments, the host cell or fermenting organism comprising a heterologous polynucleotide encoding a cellulolytic enzyme has an increased level of cellulolytic enzyme activity (e.g., increased endoglucanase, cellobiohydrolase, and/or beta-glucosidase) compared to the host cells without the heterologous polynucleotide encoding the cellulolytic enzyme, when cultivated under the same conditions. In some embodiments, the host cell or fermenting organism has an increased level of cellulolytic enzyme activity of at least 5%, e.g., at least 10%, at least 15%, at least 20%, at least 25%, at least 50%, at least 100%, at least 150%, at least 200%, at least 300%, or at 500% compared to the host cell or fermenting organism without the heterologous polynucleotide encoding the cellulolytic enzyme, when cultivated under the same conditions.

[0591] Exemplary cellulolytic enzymes that can be used with the host cells and/or the methods described herein include bacterial, yeast, or filamentous fungal cellulolytic enzymes, e.g., obtained from any of the microorganisms described or referenced herein, as described supra under the sections related to proteases.

[0592] The cellulolytic enzyme may be of any origin. In an embodiment the cellulolytic enzyme is derived from a strain of Trichoderma, such as a strain of Trichoderma reesei; a strain of Humicola, such as a strain of Humicola insolens, and/or a strain of Chrysosporium, such as a strain of Chrysosporium lucknowense. In a preferred embodiment the cellulolytic enzyme is derived from a strain of Trichoderma reesei.

[0593] The cellulolytic enzyme composition may further comprise one or more of the following polypeptides, such as enzymes: AA9 polypeptide (GH61 polypeptide) having cellulolytic enhancing activity, beta-glucosidase, xylanase, beta-xylosidase, CBH I, CBH II, or a mixture of two, three, four, five or six thereof.

[0594] The further polypeptide(s) (e.g., AA9 polypeptide) and/or enzyme(s) (e.g., beta-glucosidase, xylanase, beta-xylosidase, CBH I and/or CBH II may be foreign to the cellulolytic enzyme composition producing organism (e.g., Trichoderma reesei).

[0595] In an embodiment the cellulolytic enzyme composition comprises an AA9 polypeptide having cellulolytic enhancing activity and a beta-glucosidase.

[0596] In another embodiment the cellulolytic enzyme composition comprises an AA9 polypeptide having cellulolytic enhancing activity, a beta-glucosidase, and a CBH I.

[0597] In another embodiment the cellulolytic enzyme composition comprises an AA9 polypeptide having cellulolytic enhancing activity, a beta-glucosidase, a CBH I and a CBH II. Other enzymes, such as endoglucanases, may also be comprised in the cellulolytic enzyme composition.

[0598] As mentioned above the cellulolytic enzyme composition may comprise a number of difference polypeptides, including enzymes.

[0599] In one embodiment, the cellulolytic enzyme composition is a Trichoderma reesei cellulolytic enzyme composition, further comprising Thermoascus aurantiacus AA9 (GH61A) polypeptide having cellulolytic enhancing activity (e.g., WO2005/074656), and Aspergillus oryzae beta-glucosidase fusion protein (e.g., one disclosed in WO2008/057637, in particular shown as SEQ ID NOs: 59 and 60).

[0600] In another embodiment the cellulolytic enzyme composition is a Trichoderma reesei cellulolytic enzyme composition, further comprising Thermoascus aurantiacus AA9 (GH61A) polypeptide having cellulolytic enhancing activity (e.g., SEQ ID NO: 2 in WO2005/074656), and Aspergillus fumigatus beta-glucosidase (e.g., SEQ ID NO: 2 of WO2005/047499).

[0601] In another embodiment the cellulolytic enzyme composition is a Trichoderma reesei cellulolytic enzyme composition, further comprising Penicillium emersonii AA9 (GH61A) polypeptide having cellulolytic enhancing activity, in particular the one disclosed in WO2011/041397, and Aspergillus fumigatus beta-glucosidase (e.g., SEQ ID NO: 2 of WO2005/047499).

[0602] In another embodiment the cellulolytic enzyme composition is a Trichoderma reesei cellulolytic enzyme composition, further comprising Penicillium emersonii AA9 (GH61A) polypeptide having cellulolytic enhancing activity, in particular the one disclosed in WO2011/041397, and Aspergillus fumigatus beta-glucosidase (e.g., SEQ ID NO: 2 of WO2005/047499) or a variant disclosed in WO2012/044915 (hereby incorporated by reference), in particular one comprising one or more such as all of the following substitutions: F100D, S283G, N456E, F512Y.

[0603] In an embodiment the cellulolytic enzyme composition is a Trichoderma reesei cellulolytic composition, further comprising an AA9 (GH61A) polypeptide having cellulolytic enhancing activity, in particular the one derived from a strain of Penicillium emersonii (e.g., SEQ ID NO: 2 in WO2011/041397), Aspergillus fumigatus beta-glucosidase (e.g., SEQ ID NO: 2 in WO2005/047499) variant with one or more, in particular all of the following substitutions: F100D, S283G, N456E, F512Y and disclosed in WO2012/044915; Aspergillus fumigatus Cel7A CBH1, e.g., the one disclosed as SEQ ID NO: 6 in WO2011/057140 and Aspergillus fumigatus CBH II, e.g., the one disclosed as SEQ ID NO: 18 in WO2011/057140.

[0604] In a preferred embodiment the cellulolytic enzyme composition is a Trichoderma reesei, cellulolytic enzyme composition, further comprising a hemicellulase or hemicellulolytic enzyme composition, such as an Aspergillus fumigatus xylanase and Aspergillus fumigatus beta-xylosidase.

[0605] In an embodiment the cellulolytic enzyme composition also comprises a xylanase (e.g., derived from a strain of the genus Aspergillus, in particular Aspergillus aculeatus or Aspergillus fumigatus; or a strain of the genus Talaromyces, in particular Talaromyces leycettanus) and/or a beta-xylosidase (e.g., derived from Aspergillus, in particular Aspergillus fumigatus, or a strain of Talaromyces, in particular Talaromyces emersonii).

[0606] In an embodiment the cellulolytic enzyme composition is a Trichoderma reesei cellulolytic enzyme composition, further comprising Thermoascus aurantiacus AA9 (GH61A) polypeptide having cellulolytic enhancing activity (e.g., WO2005/074656), Aspergillus oryzae beta-glucosidase fusion protein (e.g., one disclosed in WO2008/057637, in particular as SEQ ID NOs: 59 and 60), and Aspergillus aculeatus xylanase (e.g., Xyl II in WO94/21785).

[0607] In another embodiment the cellulolytic enzyme composition comprises a Trichoderma reesei cellulolytic preparation, further comprising Thermoascus aurantiacus GH61A polypeptide having cellulolytic enhancing activity (e.g., SEQ ID NO: 2 in WO2005/074656), Aspergillus fumigatus beta-glucosidase (e.g., SEQ ID NO: 2 of WO2005/047499) and Aspergillus aculeatus xylanase (Xyl II disclosed in WO94/21785).

[0608] In another embodiment the cellulolytic enzyme composition comprises a Trichoderma reesei cellulolytic enzyme composition, further comprising Thermoascus aurantiacus AA9 (GH61A) polypeptide having cellulolytic enhancing activity (e.g., SEQ ID NO: 2 in WO2005/074656), Aspergillus fumigatus beta-glucosidase (e.g., SEQ ID NO: 2 of WO2005/047499) and Aspergillus aculeatus xylanase (e.g., Xyl II disclosed in WO94/21785).

[0609] In another embodiment the cellulolytic enzyme composition is a Trichoderma reesei cellulolytic enzyme composition, further comprising Penicillium emersonii AA9 (GH61A) polypeptide having cellulolytic enhancing activity, in particular the one disclosed in WO2011/041397, Aspergillus fumigatus beta-glucosidase (e.g., SEQ ID NO: 2 of WO2005/047499) and Aspergillus fumigatus xylanase (e.g., Xyl III in WO2006/078256).

[0610] In another embodiment the cellulolytic enzyme composition comprises a Trichoderma reesei cellulolytic enzyme composition, further comprising Penicillium emersonii AA9 (GH61A) polypeptide having cellulolytic enhancing activity, in particular the one disclosed in WO2011/041397, Aspergillus fumigatus beta-glucosidase (e.g., SEQ ID NO: 2 of WO2005/047499), Aspergillus fumigatus xylanase (e.g., Xyl III in WO2006/078256), and CBH I from Aspergillus fumigatus, in particular Cel7A CBH1 disclosed as SEQ ID NO: 2 in WO2011/057140.

[0611] In another embodiment the cellulolytic enzyme composition is a Trichoderma reesei cellulolytic enzyme composition, further comprising Penicillium emersonii AA9 (GH61A) polypeptide having cellulolytic enhancing activity, in particular the one disclosed in WO2011/041397, Aspergillus fumigatus beta-glucosidase (e.g., SEQ ID NO: 2 of WO2005/047499), Aspergillus fumigatus xylanase (e.g., Xyl III in WO2006/078256), CBH I from Aspergillus fumigatus, in particular Cel7A CBH1 disclosed as SEQ ID NO: 2 in WO2011/057140, and CBH II derived from Aspergillus fumigatus in particular the one disclosed as SEQ ID NO: 4 in WO2013/028928.

[0612] In another embodiment the cellulolytic enzyme composition is a Trichoderma reesei cellulolytic enzyme composition, further comprising Penicillium emersonii AA9 (GH61A) polypeptide having cellulolytic enhancing activity, in particular the one disclosed in WO2011/041397, Aspergillus fumigatus beta-glucosidase (e.g., SEQ ID NO: 2 of WO2005/047499) or variant thereof with one or more, in particular all, of the following substitutions: F100D, S283G, N456E, F512Y; Aspergillus fumigatus xylanase (e.g., Xyl III in WO2006/078256), CBH I from Aspergillus fumigatus, in particular Cel7A CBH I disclosed as SEQ ID NO: 2 in WO2011/057140, and CBH II derived from Aspergillus fumigatus, in particular the one disclosed in WO2013/028928.

[0613] In another embodiment the cellulolytic enzyme composition is a Trichoderma reesei cellulolytic enzyme composition comprising the CBH I (GENSEQP Accession No. AZY49536 (WO2012/103293); a CBH II (GENSEQP Accession No. AZY49446 (WO2012/103288); a beta-glucosidase variant (GENSEQP Accession No. AZU67153 (WO 2012/44915)), in particular with one or more, in particular all, of the following substitutions: F100D, S283G, N456E, F512Y; and AA9 (GH61 polypeptide) (GENSEQP Accession No. BAL61510 (WO 2013/028912)).

[0614] In another embodiment the cellulolytic enzyme composition is a Trichoderma reesei cellulolytic enzyme composition comprising a CBH I (GENSEQP Accession No. AZY49536 (WO2012/103293)); a CBH II (GENSEQP Accession No. AZY49446 (WO2012/103288); a GH10 xylanase (GENSEQP Accession No. BAK46118 (WO 2013/019827)); and a beta-xylosidase (GENSEQP Accession No. AZI04896 (WO 2011/057140)).

[0615] In another embodiment the cellulolytic enzyme composition is a Trichoderma reesei cellulolytic enzyme composition comprising a CBH I (GENSEQP Accession No. AZY49536 (WO2012/103293)); a CBH II (GENSEQP Accession No. AZY49446 (WO2012/103288)); and an AA9 (GH61 polypeptide; GENSEQP Accession No. BAL61510 (WO 2013/028912)).

[0616] In another embodiment the cellulolytic enzyme composition is a Trichoderma reesei cellulolytic enzyme composition comprising a CBH I (GENSEQP Accession No. AZY49536 (WO2012/103293)); a CBH II (GENSEQP Accession No. AZY49446 (WO2012/103288)), an AA9 (GH61 polypeptide; GENSEQP Accession No. BAL61510 (WO 2013/028912)), and a catalase (GENSEQP Accession No. BAC11005 (WO 2012/130120)).

[0617] In an embodiment the cellulolytic enzyme composition is a Trichoderma reesei cellulolytic enzyme composition comprising a CBH I (GENSEQP Accession No. AZY49446 (WO2012/103288); a CBH II (GENSEQP Accession No. AZY49446 (WO2012/103288)), a beta-glucosidase variant (GENSEQP Accession No. AZU67153 (WO 2012/44915)), with one or more, in particular all, of the following substitutions: F100D, S283G, N456E, F512Y; an AA9 (GH61 polypeptide; GENSEQP Accession No. BAL61510 (WO 2013/028912)), a GH10 xylanase (GENSEQP Accession No. BAK46118 (WO 2013/019827)), and a beta-xylosidase (GENSEQP Accession No. AZ104896 (WO 2011/057140)).

[0618] In an embodiment the cellulolytic composition is a Trichoderma reesei cellulolytic enzyme preparation comprising an EG I (Swissprot Accession No. P07981), EG 11 (EMBL Accession No. M19373), CBH I (supra); CBH II (supra); beta-glucosidase variant (supra) with the following substitutions: F100D, S283G, N456E, F512Y; an AA9 (GH61 polypeptide; supra), GH10 xylanase (supra); and beta-xylosidase (supra).

[0619] All cellulolytic enzyme compositions disclosed in WO2013/028928 are also contemplated and hereby incorporated by reference.

[0620] The cellulolytic enzyme composition comprises or may further comprise one or more (several) proteins selected from the group consisting of a cellulase, a AA9 (i.e., GH61) polypeptide having cellulolytic enhancing activity, a hemicellulase, an expansin, an esterase, a laccase, a ligninolytic enzyme, a pectinase, a peroxidase, a protease, and a swollenin.

[0621] In one embodiment the cellulolytic enzyme composition is a commercial cellulolytic enzyme composition. Examples of commercial cellulolytic enzyme compositions suitable for use in a process of the invention include: CELLIC® CTec (Novozymes A/S), CELLIC® CTec2 (Novozymes A/S), CELLIC® CTec3 (Novozymes A/S), CELLUCLAST™ (Novozymes A/S), SPEZYME™ CP (Genencor Int.), ACCELLERASE™ 1000, ACCELLERASE 1500, ACCELLERASE™ TRIO (DuPont), FILTRASE® NL (DSM); METHAPLUS® S/L 100 (DSM), ROHAMENT™ 7069 W (Röhm GmbH), or ALTERNAFUEL® CMAX3™ (Dyadic International, Inc.). The cellulolytic enzyme composition may be added in an amount effective from about 0.001 to about 5.0 wt. % of solids, e.g., about 0.025 to about 4.0 wt. % of solids or about 0.005 to about 2.0 wt. % of solids.

[0622] Additional enzymes, and compositions thereof can be found in WO2011/153516 and WO2016/045569 (the contents of which are incorporated herein).

[0623] Additional polynucleotides encoding suitable cellulolytic enzymes may be obtained from microorganisms of any genus, including those readily available within the UniProtKB database (www.uniprot.org).

[0624] The cellulolytic enzyme coding sequences can also be used to design nucleic acid probes to identify and clone DNA encoding cellulolytic enzymes from strains of different genera or species, as described supra.

[0625] The polynucleotides encoding cellulolytic enzymes may also be identified and obtained from other sources including microorganisms isolated from nature (e.g., soil, composts, water, etc.) or DNA samples obtained directly from natural materials (e.g., soil, composts, water, etc.) as described supra.

[0626] Techniques used to isolate or clone polynucleotides encoding cellulolytic enzymes are described supra.

[0627] In one embodiment, the cellulolytic enzyme has a mature polypeptide sequence of at least 60%, e.g., at least 65%, at least 70%, at least 75%, at least 80%, at least 85%, at least 90%, at least 91%, at least 92%, at least 93%, at least 94%, at least 95%, at least 96%, at least 97%, at least 98%, at least 99%, or 100% sequence identity to any cellulolytic enzyme described or referenced herein (e.g., any endoglucanase, cellobiohydrolase, or beta-glucosidase). In one embodiment, the cellulolytic enzyme ha a mature polypeptide sequence that differs by no more than ten amino acids, e.g., by no more than five amino acids, by no more than four amino acids, by no more than three amino acids, by no more than two amino acids, or by one amino acid from any cellulolytic enzyme described or referenced herein. In one embodiment, the cellulolytic enzyme has a mature polypeptide sequence that comprises or consists of the amino acid sequence of any cellulolytic enzyme described or referenced herein, allelic variant, or a fragment thereof having cellulolytic enzyme activity. In one embodiment, the cellulolytic enzyme has an amino acid substitution, deletion, and/or insertion of one or more (e.g., two, several) amino acids. In some embodiments, the total number of amino acid substitutions, deletions and/or insertions is not more than 10, e.g., not more than 9, 8, 7, 6, 5, 4, 3, 2, or 1.

[0628] In some embodiments, the cellulolytic enzyme has at least 20%, e.g., at least 40%, at least 50%, at least 60%, at least 70%, at least 80%, at least 90%, at least 95%, at least 96%, at least 97%, at least 98%, at least 99%, or 100% of the cellulolytic enzyme activity of any cellulolytic enzyme described or referenced herein (e.g., any endoglucanase, cellobiohydrolase, or beta-glucosidase) under the same conditions.

[0629] In one embodiment, the cellulolytic enzyme coding sequence hybridizes under at least low stringency conditions, e.g., medium stringency conditions, medium-high stringency conditions, high stringency conditions, or very high stringency conditions with the full-length complementary strand of the coding sequence from any cellulolytic enzyme described or referenced herein (e.g., any endoglucanase, cellobiohydrolase, or beta-glucosidase). In one embodiment, the cellulolytic enzyme coding sequence has at least 65%, e.g., at least 70%, at least 75%, at least 80%, at least 85%, at least 85%, at least 90%, at least 91%, at least 92%, at least 93%, at least 94%, at least 95%, at least 96%, at least 97%, at least 98%, at least 99%, or 100% sequence identity with the coding sequence from any cellulolytic enzyme described or referenced herein.

[0630] In one embodiment, the polynucleotide encoding the cellulolytic enzyme comprises the coding sequence of any cellulolytic enzyme described or referenced herein (e.g., any endoglucanase, cellobiohydrolase, or beta-glucosidase). In one embodiment, the polynucleotide encoding the cellulolytic enzyme comprises a subsequence of the coding sequence from any cellulolytic enzyme described or referenced herein, wherein the subsequence encodes a polypeptide having cellulolytic enzyme activity. In one embodiment, the number of nucleotides residues in the subsequence is at least 75%, e.g., at least 80%, 85%, 90%, or 95% of the number of the referenced coding sequence.

[0631] The cellulolytic enzyme can also include fused polypeptides or cleavable fusion polypeptides, as described supra.

### Fermentation Products

[0632] A fermentation product can be any substance derived from the fermentation. The fermentation product can be, without limitation, an alcohol (e.g., arabinitol, n-butanol, isobutanol, ethanol, glycerol, methanol, ethylene glycol, 1,3-propanediol [propylene glycol], butanediol, glycerin, sorbitol, and xylitol); an alkane (e.g., pentane, hexane, heptane, octane, nonane, decane, undecane, and dodecane), a cycloalkane (e.g., cyclopentane, cyclohexane, cycloheptane, and cyclooctane), an alkene (e.g., pentene, hexene, heptene, and octene); an amino acid (e.g., aspartic acid, glutamic acid, glycine, lysine, serine, and threonine); a gas (e.g., methane, hydrogen (H₂), carbon dioxide (CO₂), and carbon monoxide (CO)); isoprene; a ketone (e.g., acetone); an organic acid (e.g., acetic acid, acetonic acid, adipic acid, ascorbic acid, citric acid, 2,5-diketo-D-gluconic acid, formic acid, fumaric acid, glucaric acid, gluconic acid, glucuronic acid, glutaric acid, 3-hydroxypropionic acid, itaconic acid, lactic acid, malic acid, malonic acid, oxalic acid, oxaloacetic acid, propionic acid, succinic acid, and xylonic acid); and polyketide.

[0633] In one embodiment, the fermentation product is an alcohol. The term “alcohol” encompasses a substance that contains one or more hydroxyl moieties. The alcohol can be, but is not limited to, n-butanol, isobutanol, ethanol, methanol, arabinitol, butanediol, ethylene glycol, glycerin, glycerol, 1,3-propanediol, sorbitol, xylitol. See, for example, Gong et al., 1999, Ethanol production from renewable resources, in Advances in Biochemical Engineering/Biotechnology, Scheper, T., ed., Springer-Verlag Berlin Heidelberg, Germany, 65: 207-241; Silveira and Jonas, 2002, Appl. Microbiol. Biotechnol. 59: 400-408; Nigam and Singh, 1995, Process Biochemistry 30(2): 117-124; Ezeji et al., 2003, World Journal of Microbiology and Biotechnology 19(6): 595-603. In one embodiment, the fermentation product is ethanol.

[0634] In another embodiment, the fermentation product is an alkane. The alkane may be an unbranched or a branched alkane. The alkane can be, but is not limited to, pentane, hexane, heptane, octane, nonane, decane, undecane, or dodecane.

[0635] In another embodiment, the fermentation product is a cycloalkane. The cycloalkane can be, but is not limited to, cyclopentane, cyclohexane, cycloheptane, or cyclooctane.

[0636] In another embodiment, the fermentation product is an alkene. The alkene may be an unbranched or a branched alkene. The alkene can be, but is not limited to, pentene, hexene, heptene, or octene.

[0637] In another embodiment, the fermentation product is an amino acid. The organic acid can be, but is not limited to, aspartic acid, glutamic acid, glycine, lysine, serine, or threonine. See, for example, Richard and Margaritis, 2004, Biotechnology and Bioengineering 87(4): 501-515.

[0638] In another embodiment, the fermentation product is a gas. The gas can be, but is not limited to, methane, H₂, CO₂, or CO. See, for example, Kataoka et al., 1997, Water Science and Technology 36(6-7): 41-47; and Gunaseelan, 1997, Biomass and Bioenergy 13(1-2): 83-114.

[0639] In another embodiment, the fermentation product is isoprene.

[0640] In another embodiment, the fermentation product is a ketone. The term “ketone” encompasses a substance that contains one or more ketone moieties. The ketone can be, but is not limited to, acetone.

[0641] In another embodiment, the fermentation product is an organic acid. The organic acid can be, but is not limited to, acetic acid, acetonic acid, adipic acid, ascorbic acid, citric acid, 2,5-diketo-D-gluconic acid, formic acid, fumaric acid, glucaric acid, gluconic acid, glucuronic acid, glutaric acid, 3-hydroxypropionic acid, itaconic acid, lactic acid, malic acid, malonic acid, oxalic acid, propionic acid, succinic acid, or xylonic acid. See, for example, Chen and Lee, 1997, Appl. Biochem. Biotechnol. 63-65: 435-448.

[0642] In another embodiment, the fermentation product is polyketide.

[0643] In some embodiments, the host cell or fermenting organism (or processes thereof), provide higher yield of fermentation product (e.g., ethanol) when compared to using an otherwise identical cell encoding the mature polypeptide without a signal peptide linked to the N-terminus under the same conditions. In some embodiments, the process results in at least 0.25%, such as 0.5%, 0.75%, 1.0%, 1.25%, 1.5%, 1.75%, 2%, 3% or 5% higher yield of the fermentation product (e.g., ethanol).

### Recovery

[0644] The fermentation product, e.g., ethanol, can optionally be recovered from the fermentation medium using any method known in the art including, but not limited to, chromatography, electrophoretic procedures, differential solubility, distillation, or extraction. For example, alcohol is separated from the fermented cellulosic material and purified by conventional methods of distillation. Ethanol with a purity of up to about 96 vol. % can be obtained, which can be used as, for example, fuel ethanol, drinking ethanol, i.e., potable neutral spirits, or industrial ethanol.

[0645] In some embodiments of the methods, the fermentation product after being recovered is substantially pure. With respect to the methods herein, “substantially pure” intends a recovered preparation that contains no more than 15% impurity, wherein impurity intends compounds other than the fermentation product (e.g., ethanol). In one variation, a substantially pure preparation is provided wherein the preparation contains no more than 25% impurity, or no more than 20% impurity, or no more than 10% impurity, or no more than 5% impurity, or no more than 3% impurity, or no more than 1% impurity, or no more than 0.5% impurity.

[0646] Suitable assays to test for the production of ethanol and contaminants, and sugar consumption can be performed using methods known in the art. For example, ethanol product, as well as other organic compounds, can be analyzed by methods such as HPLC (High Performance Liquid Chromatography), GC-MS (Gas Chromatography Mass Spectroscopy) and LC-MS (Liquid Chromatography-Mass Spectroscopy) or other suitable analytical methods using routine procedures well known in the art. The release of ethanol in the fermentation broth can also be tested with the culture supernatant. Byproducts and residual sugar in the fermentation medium (e.g., glucose or xylose) can be quantified by HPLC using, for example, a refractive index detector for glucose and alcohols, and a UV detector for organic acids (Lin et al., Biotechnol. Bioeng. 90:775 -779 (2005)), or using other suitable assay and detection methods well known in the art.

[0647] The invention may further be described in the following numbered paragraphs:
[0648] Paragraph [1]. A method of producing a fermentation product from a starch-containing or cellulosic-containing material, the method comprising:
   [0649] (a) saccharifying the starch-containing or cellulosic-containing material; and
   [0650] (b) fermenting the saccharified material of step (a) with a fermenting organism;
   [0651] wherein the fermenting organism comprises a nucleic acid construct encoding a fusion protein;
   [0652] wherein the fusion protein comprises a signal peptide linked to the N-terminus of a mature polypeptide;
   [0653] wherein the signal peptide is foreign to the mature polypeptide; and
   [0654] wherein the signal peptide has an amino acid sequence with at least 60%, e.g., at least 65%, 70%, 75%, 80%, 85%, 90%, 95%, 97%, 98%, 99%, or 100% sequence identity, to the amino acid sequence of any one of SEQ ID NOs: 244-339.
[0655] Paragraph [2]. The method of paragraph [1], wherein saccharification of step (a) occurs on a starch-containing material, and wherein the starch-containing material is either gelatinized or ungelatinized starch.
[0656] Paragraph [3]. The method of paragraph [2], comprising liquefying the starch-containing material by contacting the material with an alpha-amylase prior to saccharification.
[0657] Paragraph [4]. The method of paragraph [2] or [3], wherein liquefying the starch-containing material and/or saccharifying the starch-containing material is conducted in presence of exogenously added protease.
[0658] Paragraph [5]. The method of any one of paragraphs [1]-[4], wherein fermentation is performed under reduced nitrogen conditions (e.g., less than 1000 ppm urea or ammonium hydroxide, such as less than 750 ppm, less than 500 ppm, less than 400 ppm, less than 300 ppm, less than 250 ppm, less than 200 ppm, less than 150 ppm, less than 100 ppm, less than 75 ppm, less than 50 ppm, less than 25 ppm, or less than 10 ppm).
[0659] Paragraph [6]. The method of any one of paragraphs [1]-[5], wherein fermentation and saccharification are performed simultaneously in a simultaneous saccharification and fermentation (SSF).
[0660] Paragraph [7]. The method of any one of paragraphs [1]-[5], wherein fermentation and saccharification are performed sequentially (SHF).
[0661] Paragraph [8]. The method of any one of paragraphs [1]-[7], comprising recovering the fermentation product from the fermentation.
[0662] Paragraph [9]. The method of paragraph [8], wherein recovering the fermentation product from the fermentation comprises distillation.
[0663] Paragraph [10]. The method of any one of paragraphs [1]-[9], wherein the fermentation product is ethanol.
[0664] Paragraph [11]. The method of any one of paragraphs [1]-[10], wherein the method results in higher yield of fermentation product when compared to using an otherwise identical cell encoding the mature polypeptide without a signal peptide linked to the N-terminus under the same conditions.
[0665] Paragraph [12]. The method of paragraph [11], wherein the method results in at least 0.25% (e.g., 0.5%, 0.75%, 1.0%, 1.25%, 1.5%, 1.75%, 2%, 3% or 5%) higher yield of fermentation product.
[0666] Paragraph [13]. The method of any one of paragraphs [1]-[12], wherein the signal peptide differs by no more than ten amino acids, e.g., by no more than five amino acids, by no more than four amino acids, by no more than three amino acids, by no more than two amino acids, or by one amino acid from the amino acid sequence of any one of SEQ ID NOs: 244-339.
[0667] Paragraph [14]. The method of any one of paragraphs [1]-[12], wherein the signal peptide comprises or consists of the amino acid sequence of any one of SEQ ID NOs: 244-339.
[0668] Paragraph [15]. The method of any one of paragraphs [1]-[14], wherein the signal peptide is directly linked to the N-terminus of a mature polypeptide without an intervening linker sequence.
[0669] Paragraph [16]. The method of any one of paragraphs [1]-[15], wherein the mature polypeptide is an glucoamylase, alpha-amylase, protease or beta-glucosidase.
[0670] Paragraph [17]. The method of paragraph [16], wherein the mature polypeptide is an alpha-amylase, and wherein the fermenting organism has higher alpha-amylase activity (e.g., using the method described in Example 2) when compared to using an otherwise identical fermenting organism encoding the alpha-amylase without a signal peptide linked to the N-terminus under the same conditions.
[0671] Paragraph [18]. The method of paragraph [16] or [17], wherein the alpha-amylase has a mature polypeptide sequence of at least 60%, e.g., at least 65%, 70%, 75%, 80%, 85%, 90%, 95%, 97%, 98%, 99%, or 100% sequence identity to the amino acid sequence of any one of SEQ ID NOs: 76-101, 121-174 and 231.
[0672] Paragraph [19]. The method of paragraph [16], wherein the mature polypeptide is a glucoamylase, and wherein the fermenting organism has higher glucoamylase activity (e.g., using the method described in Example 3) when compared to using an otherwise identical fermenting organism encoding the glucoamylase without a signal peptide linked to the N-terminus under the same conditions.
[0673] Paragraph [20]. The method of paragraph [16] or [19], wherein the glucoamylase has a mature polypeptide sequence with 60%, e.g., at least 65%, 70%, 75%, 80%, 85%, 90%, 95%, 97%, 98%, 99%, or 100% sequence identity, to the amino acid sequence of a Pycnoporus glucoamylase (e.g., a Pycnoporus sanguineus glucoamylase of SEQ ID NO: 229), a Gloeophyllum glucoamylase (e.g. a Gloeophyllum sepiarium of SEQ ID NO: 8), or a glucoamylase of any one of SEQ ID NOs: 102-113 (e.g., a Saccharomycopsis fibuligera glucoamylase of SEQ ID NO: 103 or 104, or a Trichoderma reesei glucoamylase of SEQ ID NO: 230).
[0674] Paragraph [21]. The method of paragraph [16], wherein the mature polypeptide is a protease, and wherein the fermenting organism as higher protease activity (e.g., using the method described in Example 5) when compared to using an otherwise identical fermenting organism encoding the protease without a signal peptide linked to the N-terminus under the same conditions.
[0675] Paragraph [22]. The method of paragraph [16] or [21], wherein the protease has a mature polypeptide sequence of at least 60%, e.g., at least 65%, 70%, 75%, 80%, 85%, 90%, 95%, 97%, 98%, 99%, or 100% sequence identity to the amino acid sequence of any one of SEQ ID NOs: 9-73.
[0676] Paragraph [23]. The method of paragraph [16], wherein the mature polypeptide is a beta-glucosidase, and wherein the fermenting organism has higher beta-glucosidase activity (e.g., using the method described in Example 6) when compared to using an otherwise identical fermenting organism encoding the beta-glucosidase without a signal peptide linked to the N-terminus under the same conditions.
[0677] Paragraph [24]. The method of paragraph [16] or [23], wherein the beta-glucosidase has a mature polypeptide sequence of at least 60%, e.g., at least 65%, 70%, 75%, 80%, 85%, 90%, 95%, 97%, 98%, 99%, or 100% sequence identity to the amino acid sequence of SEQ ID NO: 441.
[0678] Paragraph [25]. The method of any one of paragraphs [1]-[24], wherein fermenting organism is a yeast cell.
[0679] Paragraph [26]. The method of paragraph [25], wherein the fermenting organism is a Saccharomyces, Rhodotorula, Schizosaccharomyces, Kluyveromyces, Pichia, Hansenula, Rhodosporidium, Candida, Yarrowia, Lipomyces, Cryptococcus, or Dekkera sp. yeast cell.
[0680] Paragraph [27]. The method of paragraph [25], wherein the fermenting organism is Saccharomyces cerevisiae.
[0681] Paragraph [28]. The method of any one of paragraphs [1]-[24], wherein the fermenting organism further comprises a heterologous polynucleotide encoding a phospholipase, trehalase or pullulanase.
[0682] Paragraph [29]. The method of paragraph [29], wherein the heterologous polynucleotide is operably linked to a promoter that is foreign to the polynucleotide.
[0683] Paragraph [30]. A recombinant host cell comprising a nucleic acid construct or expression vector encoding a fusion protein;
   [0684] wherein the fusion protein comprises a signal peptide linked to the N-terminus of a mature polypeptide;
   [0685] wherein the signal peptide is foreign to the mature polypeptide; and
   [0686] wherein the signal peptide has an amino acid sequence with at least 60%, e.g., at least 65%, 70%, 75%, 80%, 85%, 90%, 95%, 97%, 98%, 99%, or 100% sequence identity, to the amino acid sequence of any one of SEQ ID NOs: 244-339.
[0687] Paragraph [31]. The recombinant host cell of paragraph [30], wherein the signal peptide differs by no more than ten amino acids, e.g., by no more than five amino acids, by no more than four amino acids, by no more than three amino acids, by no more than two amino acids, or by one amino acid from the amino acid sequence of any one of SEQ ID NOs: 244-339.
[0688] Paragraph [32]. The recombinant host cell of paragraph [30], wherein the signal peptide comprises or consists of the amino acid sequence of any one of SEQ ID NOs: 244-339.
[0689] Paragraph [33]. The recombinant host cell of any one of paragraphs [30]-[32], wherein the signal peptide is directly linked to the N-terminus of a mature polypeptide without an intervening linker sequence.
[0690] Paragraph [34]. The recombinant host cell of any one of paragraphs [30]-[33], wherein the mature polypeptide is a glucoamylase, alpha-amylase, protease or beta-glucosidase.
[0691] Paragraph [35]. The recombinant host cell of paragraph [34], wherein the mature polypeptide is an alpha-amylase, and wherein the cell has higher alpha-amylase activity (e.g., using the method described in Example 2) when compared to an otherwise identical cell encoding the alpha-amylase without a signal peptide linked to the N-terminus under the same conditions.
[0692] Paragraph [36]. The recombinant host cell of paragraph [34] or [35], wherein the alpha-amylase has a mature polypeptide sequence of at least 60%, e.g., at least 65%, 70%, 75%, 80%, 85%, 90%, 95%, 97%, 98%, 99%, or 100% sequence identity to the amino acid sequence of any one of SEQ ID NOs: 76-101, 121-174 and 231.
[0693] Paragraph [37]. The recombinant host cell of paragraph [34], wherein the mature polypeptide is a glucoamylase, and wherein cell has higher glucoamylase activity (e.g., using the method described in Example 3) when compared to an otherwise identical cell encoding the glucoamylase without a signal peptide linked to the N-terminus under the same conditions.
[0694] Paragraph [38]. The recombinant host cell of paragraph [34] or [37], wherein the glucoamylase has a mature polypeptide sequence with 60%, e.g., at least 65%, 70%, 75%, 80%, 85%, 90%, 95%, 97%, 98%, 99%, or 100% sequence identity, to the amino acid sequence of a Pycnoporus glucoamylase (e.g., a Pycnoporus sanguineus glucoamylase of SEQ ID NO: 229), a Gloeophyllum glucoamylase (e.g. a Gloeophyllum sepiarium of SEQ ID NO: 8), or a glucoamylase of any one of SEQ ID NOs: 102-113 (e.g., a Saccharomycopsis fibuligera glucoamylase of SEQ ID NO: 103 or 104, or a Trichoderma reesei glucoamylase of SEQ ID NO: 230).
[0695] Paragraph [39]. The recombinant host cell of paragraph [34], wherein the mature polypeptide is a protease, and wherein the cell has higher protease activity (e.g., using the method described in Example 5) when compared to using an otherwise identical cell encoding the protease without a signal peptide linked to the N-terminus under the same conditions.
[0696] Paragraph [40]. The recombinant host cell of paragraph [34] or [39], wherein the protease has a mature polypeptide sequence of at least 60%, e.g., at least 65%, 70%, 75%, 80%, 85%, 90%, 95%, 97%, 98%, 99%, or 100% sequence identity to the amino acid sequence of any one of SEQ ID NOs: 9-73.
[0697] Paragraph [41]. The recombinant host cell of paragraph [34], wherein the mature polypeptide is a beta-glucosidase, and wherein the method results in higher beta-glucosidase activity (e.g., using the method described in Example 6) when compared to using an otherwise identical cell encoding the beta-glucosidase without a signal peptide linked to the N-terminus under the same conditions.
[0698] Paragraph [42]. The recombinant host cell of paragraph [34] or [41], wherein the beta-glucosidase has a mature polypeptide sequence of at least 60%, e.g., at least 65%, 70%, 75%, 80%, 85%, 90%, 95%, 97%, 98%, 99%, or 100% sequence identity to the amino acid sequence of SEQ ID NO: 441.
[0699] Paragraph [43]. The recombinant host cell of any one of paragraphs [30]-[42], wherein cell is a yeast cell.
[0700] Paragraph [44]. The recombinant host cell of paragraph 043, wherein the cell is a Saccharomyces, Rhodotorula, Schizosaccharomyces, Kluyveromyces, Pichia, Hansenula, Rhodosporidium, Candida, Yarrowia, Lipomyces, Cryptococcus, or Dekkera sp. yeast cell.
[0701] Paragraph [45]. The recombinant host cell of paragraph [43], wherein the cell is Saccharomyces cerevisiae.
[0702] Paragraph [46]. The recombinant host cell of any one of paragraphs [30]-[45], wherein the cell further comprises a heterologous polynucleotide encoding a phospholipase, trehalase or pullulanase.
[0703] Paragraph [47]. The recombinant host cell of paragraph [46], wherein the heterologous polynucleotide is operably linked to a promoter that is foreign to the polynucleotide.
[0704] Paragraph [48]. A nucleic acid construct or expression vector encoding a fusion protein,
   [0705] wherein the fusion protein comprises a signal peptide linked to the N-terminus of a mature polypeptide;
   [0706] wherein the signal peptide is foreign to the mature polypeptide; and
   [0707] wherein the signal peptide has an amino acid sequence with at least 60%, e.g., at least 65%, 70%, 75%, 80%, 85%, 90%, 95%, 97%, 98%, 99%, or 100% sequence identity, to the amino acid sequence of any one of SEQ ID NOs: 244-339.
[0708] Paragraph [49]. The nucleic acid construct or expression vector of paragraph [48], wherein the signal peptide differs by no more than ten amino acids, e.g., by no more than five amino acids, by no more than four amino acids, by no more than three amino acids, by no more than two amino acids, or by one amino acid from the amino acid sequence of any one of SEQ ID NOs: 244-339.
[0709] Paragraph [50]. The nucleic acid construct or expression vector of paragraph [48], wherein the signal peptide comprises or consists of the amino acid sequence of any one of SEQ ID NOs: 244-339.
[0710] Paragraph [51]. The nucleic acid construct or expression vector of any one of paragraphs [48]-[50], wherein the signal peptide is directly linked to the N-terminus of a mature polypeptide without an intervening linker sequence.
[0711] Paragraph [52]. The nucleic acid construct or expression vector of any one of paragraphs [48]-[51], wherein the mature polypeptide is a glucoamylase, alpha-amylase, protease or beta-glucosidase.
[0712] Paragraph [53]. The nucleic acid construct or expression vector of paragraph [52], wherein the alpha-amylase has a mature polypeptide sequence of at least 60%, e.g., at least 65%, 70%, 75%, 80%, 85%, 90%, 95%, 97%, 98%, 99%, or 100% sequence identity to the amino acid sequence of any one of SEQ ID NOs: 76-101, 121-174 and 231.
[0713] Paragraph [54]. The nucleic acid construct or expression vector of paragraph [52], wherein the glucoamylase has a mature polypeptide sequence with 60%, e.g., at least 65%, 70%, 75%, 80%, 85%, 90%, 95%, 97%, 98%, 99%, or 100% sequence identity, to the amino acid sequence of a Pycnoporus glucoamylase (e.g., a Pycnoporus sanguineus glucoamylase of SEQ ID NO: 229), a Gloeophyllum glucoamylase (e.g. a Gloeophyllum sepiarium of SEQ ID NO: 8), or a glucoamylase of any one of SEQ ID NOs: 102-113 (e.g., a Saccharomycopsis fibuligera glucoamylase of SEQ ID NO: 103 or 104, or a Trichoderma reesei glucoamylase of SEQ ID NO: 230).
[0714] Paragraph [55]. The nucleic acid construct or expression vector of paragraph [52], wherein the protease has a mature polypeptide sequence of at least 60%, e.g., at least 65%, 70%, 75%, 80%, 85%, 90%, 95%, 97%, 98%, 99%, or 100% sequence identity to the amino acid sequence of any one of SEQ ID NOs: 9-73.
[0715] Paragraph [56]. The nucleic acid construct or expression vector of paragraph [52], wherein the beta-glucosidase has a mature polypeptide sequence of at least 60%, e.g., at least 65%, 70%, 75%, 80%, 85%, 90%, 95%, 97%, 98%, 99%, or 100% sequence identity to the amino acid sequence of SEQ ID NO: 441.
[0716] Paragraph [57]. A method of producing the mature polypeptide of any one of paragraphs [30]-[47], the method comprising:
   [0717] (a) cultivating the recombinant host cell of any one of paragraphs [30]-[47], under conditions conducive for production of the polypeptide; and
   [0718] (b) recovering the protein.
[0719] Paragraph [58]. A composition comprising the recombinant host cell of any one of paragraphs [30]-[47] and one or more naturally occurring and/or non-naturally occurring components, such as components are selected from the group consisting of: surfactants, emulsifiers, gums, swelling agents, and antioxidants.
[0720] Paragraph [59]. A method of producing a derivative of a recombinant host cell of any one of paragraphs [30]-[47], the method comprising:
   [0721] (a) providing:
      [0722] (i) a first host cell; and
      [0723] (ii) a second host cell, wherein the second host cell is a recombinant host cell of any one of paragraphs [30]-[47];
   [0724] (b) culturing the first host cell and the second host cell under conditions which permit combining of DNA between the first and second host cells;
   [0725] (c) screening or selecting for a derive host cell.
[0726] Paragraph [60]. A method of producing ethanol, comprising incubating a recombinant host cell of any one of paragraphs [30]-[47] with a substrate comprising a fermentable sugar under conditions which permit fermentation of the fermentable sugar to produce ethanol.
[0727] Paragraph [59]. Use of a recombinant host cell of any one of paragraphs [30]-[47] in the production of ethanol.

[0728] The invention described and claimed herein is not to be limited in scope by the specific aspects or embodiments herein disclosed, since these aspects/embodiments are intended as illustrations of several aspects of the invention. Any equivalent aspects are intended to be within the scope of this invention. Indeed, various modifications of the invention in addition to those shown and described herein will become apparent to those skilled in the art from the foregoing description. Such modifications are also intended to fall within the scope of the appended claims. In the case of conflict, the present disclosure including definitions will control. All references are specifically incorporated by reference for that which is described.

[0729] The following examples are offered to illustrate certain aspects/embodiments of the present invention, but not in any way intended to limit the scope of the invention as claimed.

### EXAMPLES

### Materials and Methods

[0730] Chemicals used as buffers and substrates were commercial products of at least reagent grade.

### Example 1: Construction of Yeast Strains Expressing a Heterologous Alpha-Amylase or Glucoamylase Linked to a Signal Peptide

[0731] This example describes the construction of yeast cells containing a heterologous alpha-amylase or glucoamylase linked to a unique signal sequence and under control of an S. cerevisiae TDH3 promoter. Three DNA containing the promoter, signal peptide, gene and terminator were designed to allow for homologous recombination between the three DNA fragments and into the X-3 locus of the yeast MBG4994 (See, WO2019/148192). The resulting strains contain one promoter-containing fragment (left fragment), one signal peptide-containing fragment (middle fragment) and one gene and PRM9 terminator fragment (right fragment) integrated into the S. cerevisiae genome at the X-3 locus.

### Construction of the Promoter-Containing Fragments (Left Fragments)

[0732] Linear DNA containing 300 bp homology to the X-3 site and the S. cerevisiae TDH3 promoter (SEQ ID NO: 1) was PCR amplified from P115-D09 genomic DNA (See, WO2020/023411) with primers 1221757 (5′-AGCACA ATCCA AGGAA AAATC TGGCC-3′; SEQ ID NO: 436) and 1226246 (5′-TTTGT TTGTT TATGT GTGTT TATTC G-3′; SEQ ID NO: 437). 50 pmoles each of forward and reverse primer was used in a PCR reaction containing 5 ng of plasmid DNA as template, 0.1 mM each dATP, dGTP, dCTP, dTTP, 1× Phusion HF Buffer (Thermo Fisher Scientific), and 2 units Phusion Hot Start DNA polymerase in a final volume of 50 μL. The PCR was performed in a T100™ Thermal Cycler (Bio-Rad Laboratories, Inc.) programmed for one cycle at 98° C. for 3 minutes followed by 32 cycles each at 98° C. for 10 seconds, 50° C. for 20 seconds, and 72° C. for 2 minutes with a final extension at 72° C. for 5 minutes. Following thermocycling, the PCR reaction products gel isolated and cleaned up using the NucleoSpin Gel and PCR clean-up kit (Machery-Nagel).

### Construction of the Signal Peptide-Containing Fragments (Middle Fragments)

[0733] Synthetic linear uncloned DNA containing 125 bp homology to the S. cerevisiae TDH3 promoter (SEQ ID NO: 1), unique signal peptide and 130 bp of the 5′ end of the mature alpha-amylase coding sequence (encoding the alpha-amylase of SEQ ID NO: 130) was synthesized by Twist Bioscience (San Francisco, Calif.). Similar linear uncloned DNA but containing 130 bp of the 5′ end of the mature glucoamylase coding sequence (encoding the glucoamylase of SEQ ID NO: 8) was synthesized by Fisher Scientific (Waltham, Mass.).

### Construction of the Gene and Terminator-Containing Fragment (Right Fragment)

[0734] The linear DNA containing the mature alpha-amylase coding sequence (encoding the alpha-amylase of SEQ ID NO: 130), PRM9 terminator (SEQ ID NO: 243) and X-3 3′ end homology was PCR amplified from MeJi730 genomic DNA (MBG4994 of WO2019/148192 further expressing the glucoamylase of SEQ ID NO: 8 and the alpha-amylase of SEQ ID NO: 130) with primers 1226263 (5′-GCCA CTAGC GATGA TTGGA AG-3′; SEQ ID NO: 438) and 1221747 (5′-GGGGT CGCAA CTTTT CCC-3′; SEQ ID NO: 439). 50 pmoles each of forward and reverse primer was used in a PCR reaction containing 5 ng of plasmid DNA as template, 0.1 mM each dATP, dGTP, dCTP, dTTP, 1× Phusion HF Buffer (Thermo Fisher Scientific), and 2 units Phusion Hot Start DNA polymerase in a final volume of 50 μL. The PCR was performed in a T100™ Thermal Cycler (Bio-Rad Laboratories, Inc.) programmed for one cycle at 98° C. for 3 minutes followed by 32 cycles each at 98° C. for 10 seconds, 55° C. for 20 seconds, and 72° C. for 2 minutes with a final extension at 72° C. for 5 minutes. Following thermocycling, the PCR reaction products gel isolated and cleaned up using the NucleoSpin Gel and PCR clean-up kit (Machery-Nagel).

[0735] The linear DNA containing the mature glucoamylase coding sequence (encoding the glucoamylase of SEQ ID NO: 8), PRM9 terminator (SEQ ID NO: 243) and X-3 3′ end homology was PCR amplified from ySHCX026 genomic DNA (MBG4994 of WO2019/148192 further expressing the glucoamylase of SEQ ID NO: 8) with primers 1223107 (5′-CAGTC TGTGG ATTCC TACG-3′; SEQ ID NO: 440) and 1221747 (5′-GGGGT CGCAA CTTTT CCC-3′; SEQ ID NO: 439) using the conditions described above.

### Integration of the Left, Middle, and Right-Hand Fragments to Generate Yeast Strains Expressing a Heterologous Alpha-Amylase or Heterologous Glucoamylase Linked to a Unique Signal Peptide

[0736] To generate yeast strains with a unique signal peptide in front of glucoamylase or alpha-amylase described above, a left, middle and right piece of DNA were used for each transformation. The left piece containing the 5′ integration homology and promoter, middle pieces containing the unique signal peptide, and right piece containing the mature peptide DNA sequence, terminator and 3′ integration homology were transformed into MBG4994. In each transformation, 100 ng of the fixed left fragment and 100 ng of the fixed right fragment was used. The middle fragment consisted of the unique signal peptide and 50 ng was used for each pool. To aid in homologous recombination of the left, middle, and right fragments at the genomic X-3 sites, 500 ng of a plasmid containing Cas9 and guide RNA specific to X-3 (pMCTS442) was also used in the transformation. These four components were transformed into MBG4994, following a yeast electroporation protocol. Transformants were selected on YPD+cloNAT to select for transformants that contain the Cas9 plasmid pMCTS442. Transformants were picked using a Q-pix Colony Picking System (Molecular Devices) to inoculate 1 colony-well of 96-well plates containing YPD+cloNAT media. The plates were grown for 2 days at 30° C., then glycerol was added to 20% final concentration and the plates were stored at -80° C. until needed. Integration of the cassette at X-3 was verified by PCR with primers 1218018 (5′-GTTAC TGTTG TCCAC AGGC-3′; SEQ ID NO: 442) and 1218019 (5′-CTTGC TGCAT GGAGA CAAGT G-3′; SEQ ID NO: 443) and NGS sequencing of the amplicon.

### Example 2: Alpha-Amylase Activity of Yeast Strains Expressing an Alpha-Amylase Linked to a Unique Signal Sequence

[0737] This example describes the alpha-amylase activity of yeast strains from Example 1 which express a heterologous alpha-amylase linked to a unique signal sequence.

### Preparation of Yeast Culture Supernatant for Enzyme Activity Assay

[0738] Yeast strains were cultivated for 48 hours in standard YPD media containing 6% glucose. The cultured yeast medium was centrifuged at 3000 rpm for 10 min to collect the supernatant. The supernatant was used for enzyme activity assay, as described below.

### Alpha-Amylase Activity Assay

[0739] Alpha-amylase activity was detected by measuring the amount of starch degraded through enzymatic hydrolysis of starch. Potassium iodide and iodine reagent was used to measure the residual starch based on the color development from application of the reagent. The color intensity measured on a spectrophotometer or microplate reader is inversely proportional to alpha-amylase activity. Reaction conditions and color development were described in Table 6 and Table 7, respectively.

TABLE 6
Alpha-amylase reaction conditions

| Amount of yeast supernatant | 20 | μl |
|---|---|---|
| Amount of substrate | 130 | μl |
| Substrate | 2 mM starch | |
| Buffer | Sodium acetate, 0.1M, 0.01% Triton 100 | |
| pH | 5.0 ± 0.05 | |
| Incubation temperature | 20° | C. |
| Reaction time | 3 | hr |

TABLE 7
Color development

| Reaction mixture | 150 | μl |
|---|---|---|
| Amount of reagent | 50 | μl |
| Reagent | 14.5 mM potassium iodide, 0.9 mM iodine | |
| Incubation temperature | 20° | C. |
| Reaction time | 5 | min |
| Wavelength | 595 | nm |

### Results

[0740] The resulting data is shown in Table 8 where “Mean (residual starch)” indicates the residual starch (in triplicate), which is inversely proportional to alpha-amylase activity. As the data shows, less residual starch remained from several yeast strains expressing a heterologous alpha-amylase linked to a unique signal sequence.

TABLE 8

| | | | | | | Mean |
|---|---|---|---|---|---|---|
| | | | | | | residual |
| | | | | Signal | | starch |
| SP | | | Signal | coding | # strain | assay |
| number | Donor Organism | Donor Source Peptide | SEQ ID | SEQ ID | isolates | (mM) |
| MBG | — | — | — | — | 9 | 2 |
| 4994 | | | | | | |
| SP1 | Acremonium | GH25 lysozyme | 244 | 340 | 2 | 0.593 |
| | alcalophium | | | | | |
| SP2 | Aspergillus fumigatus | CBH 1 | 245 | 341 | 4 | 1.065 |
| SP3 | Aspergillus fumigatus | CBH 2 | 246 | 342 | 4 | 0.811 |
| SP4 | Ambrosiozyma | Glucoamylase | 247 | 343 | 2 | 0.754 |
| | monospora | | | | | |
| SP5 | Aspergillus oryzae | Alpha-amylase | 248 | 344 | 1 | 0.689 |
| SP6 | Candida blankii | Glucoamylase | 249 | 345 | 2 | 0.609 |
| SP7 | Candida homilentoma | Glucoamylase | 250 | 346 | 5 | 0.822 |
| SP8 | Candida silvanorum | Glucoamylase | 251 | 347 | 3 | 0.704 |
| SP9 | Dekkera bruxellensis | Glucoamylase | 252 | 348 | 4 | 1.129 |
| SP10 | Filobasidium | Glucoamylase | 253 | 349 | 2 | 0.769 |
| | capsuligenum | | | | | |
| SP11 | Gloeophyllum | Glucoamylase | 254 | 350 | 2 | 1.145 |
| | sepiarium | | | | | |
| SP12 | Gloeophyllum | Glucoamylase | 255 | 351 | 2 | 0.844 |
| | trabeum | | | | | |
| SP13 | Homo sapiens | Alpha-2-glycoprotein | 256 | 352 | 3 | 0.681 |
| SP14 | Hyphopichia burtonii | Glucoamylase | 257 | 353 | 4 | 1.046 |
| SP15 | Kluyveromyces | polygalacturonase | 258 | 354 | 5 | 0.778 |
| | marxianus | | | | | |
| SP16 | Nakazawaea ernobii | Glucoamylase | 259 | 355 | 3 | 0.722 |
| SP17 | Nakazawaea ernobii | Glucoamylase | 260 | 356 | 2 | 1.927 |
| SP18 | Ogataea methanolica | Glucoamylase | 261 | 357 | 3 | 0.829 |
| SP19 | Pycnoporus | Glucoamylase | 262 | 358 | 3 | 0.674 |
| | sanguineus | | | | | |
| SP20 | Pichia pastoris | | 263 | 359 | 3 | 1.935 |
| SP21 | Pichia pastoris | | 264 | 360 | 4 | 0.757 |
| SP22 | Pichia pastoris | | 265 | 361 | 2 | 1.033 |
| SP23 | Pichia pastoris | | 266 | 362 | 4 | 0.865 |
| SP24 | Pichia pastoris | | 267 | 363 | 4 | 0.67 |
| SP26 | Rhizomucor pusillus | Alpha-amylase | 269 | 365 | 2 | 0.592 |
| SP29 | Saccharomyces | Adhesion subunit of α- | 272 | 368 | 4 | 0.805 |
| | cerevisiae | agglutinin | | | | |
| SP30 | Saccharomyces | Chitin trans-glycosylase | 273 | 369 | 2 | 0.732 |
| | cerevisiae | | | | | |
| SP31 | Saccharomyces | Exo-1,3-β Glucanase | 274 | 370 | 4 | 0.664 |
| | cerevisiae | | | | | |
| SP32 | Saccharomyces | Phospholipase B | 275 | 371 | 1 | 0.415 |
| | cerevisiae | | | | | |
| SP33 | Saccharomyces | Cell wall protein related to | 276 | 372 | 5 | 0.658 |
| | cerevisiae | glucanases | | | | |
| SP34 | Saccharomyces | Mating pheromone α-factor | 277 | 373 | 1 | 0.768 |
| | cerevisiae | | | | | |
| SP37 | Saccharomyces | Phospholipase B | 280 | 376 | 1 | 0.596 |
| | cerevisiae | | | | | |
| SP39 | Saccharomyces | Cell wall-associated protein | 282 | 378 | 1 | 0.538 |
| | cerevisiae | involved in export of | | | | |
| | | acetylated sterols | | | | |
| SP41 | Saccharomyces | Cell wall mannoprotein | 284 | 380 | 3 | 0.662 |
| | cerevisiae | | | | | |
| SP42 | Saccharomyces | Cell wall mannoprotein | 285 | 381 | 2 | 0.762 |
| | cerevisiae | | | | | |
| SP43 | Saccharomyces | Exo-1,3-β-glucanase | 286 | 382 | 1 | 0.785 |
| | cerevisiae | | | | | |
| SP44 | Saccharomyces | Acid phosphatase | 287 | 383 | 4 | 0.684 |
| | cerevisiae | | | | | |
| SP45 | Saccharomyces | Cell wall protein | 288 | 384 | 3 | 0.648 |
| | cerevisiae | | | | | |
| SP46 | Saccharomyces | Acid phosphatase | 289 | 385 | 4 | 0.595 |
| | cerevisiae | | | | | |
| SP47 | Saccharomyces | Acid phosphatase | 290 | 386 | 2 | 0.599 |
| | cerevisiae | | | | | |
| SP52 | Saccharomyces | Aspartic proteinase | 295 | 391 | 4 | 0.675 |
| | cerevisiae | | | | | |
| SP53 | Saccharomyces | Exo-1,3-β Glucanase | 296 | 392 | 4 | 0.823 |
| | cerevisiae | | | | | |
| SP54 | Saccharomyces | Chitin transglycosylase | 297 | 393 | 4 | 0.774 |
| | cerevisiae | | | | | |
| SP55 | Saccharomyces | | 298 | 394 | 2 | 0.454 |
| | cerevisiae | | | | | |
| SP57 | Saccharomyces | Endoprotease of a-factor | 300 | 396 | 4 | 0.486 |
| | cerevisiae | mating pheromone | | | | |
| SP58 | Saccharomyces | Bud site selection protein | 301 | 397 | 4 | 1.602 |
| | cerevisiae | | | | | |
| SP59 | Saccharomyces | Aspartic proteinase yapsin-3 | 302 | 398 | 1 | 0.495 |
| | cerevisiae | | | | | |
| SP60 | Saccharomyces | Ferro-O2-oxidoreductase | 303 | 399 | 2 | 0.418 |
| | cerevisiae | | | | | |
| SP61 | Saccharomyces | 1,3-beta- | 304 | 400 | 4 | 0.466 |
| | cerevisiae | glucanosyltransferase | | | | |
| SP62 | Saccharomyces | Carboxypeptidase | 305 | 401 | 5 | 0.778 |
| | cerevisiae | | | | | |
| SP63 | Saccharomyces | 1,3-beta- | 306 | 402 | 2 | 0.446 |
| | cerevisiae | glucanosyltransferase | | | | |
| SP65 | Saccharomyces | Glycosylphosphatidylinositol | 308 | 404 | 5 | 0.627 |
| | cerevisiae | (GPI)-anchored cell wall | | | | |
| | | endoglucanase | | | | |
| SP66 | Saccharomyces | Endo-1,3(4)-beta-glucanase 1 | 309 | 405 | 3 | 0.464 |
| | cerevisiae | | | | | |
| SP67 | Saccharomyces | Phospholipase B | 310 | 406 | 4 | 0.705 |
| | cerevisiae | | | | | |
| SP68 | Saccharomyces | 1,3-beta- | 311 | 407 | 5 | 0.716 |
| | cerevisiae | glucanosyltransferase | | | | |
| SP69 | Saccharomyces | Putative GPI-anchored | 312 | 408 | 1 | 0.406 |
| | cerevisiae | protein | | | | |
| SP70 | Saccharomyces | VEL1-related protein | 313 | 409 | 5 | 0.743 |
| | cerevisiae | | | | | |
| SP71 | Saccharomyces | Endo-beta-1,3-glucanase | 314 | 410 | 3 | 0.436 |
| | cerevisiae | | | | | |
| SP72 | Saccharomyces | Seripauperin-3 | 315 | 411 | 1 | 0.423 |
| | cerevisiae | | | | | |
| SP73 | Saccharomyces | Seripauperin-5 | 316 | 412 | 1 | 0.445 |
| | cerevisiae | | | | | |
| SP74 | Saccharomyces | Cell wall mannoprotein | 317 | 413 | 2 | 0.425 |
| | cerevisiae | | | | | |
| SP75 | Saccharomyces | GPI-anchored cell surface | 318 | 414 | 4 | 1.405 |
| | cerevisiae | glycoprotein (flocculin) | | | | |
| SP76 | Saccharomyces | Cell wall mannoprotein | 319 | 415 | 4 | 0.442 |
| | cerevisiae | | | | | |
| SP77 | Saccharomyces | Cold shock-induced protein | 320 | 416 | 1 | 0.424 |
| | cerevisiae | | | | | |
| SP78 | Saccharomyces | Cell wall protein | 321 | 417 | 3 | 0.5 |
| | cerevisiae | | | | | |
| SP79 | Saccharomyces | Stress-induced structural | 322 | 418 | 3 | 0.439 |
| | cerevisiae | GPI-cell wall glycoprotein | | | | |
| SP80 | Saccharomyces | Mating pheromone alpha-factor | 323 | 419 | 3 | 0.422 |
| | cerevisiae | | | | | |
| SP81 | Saccharomyces | Signaling mucin | 324 | 420 | 4 | 1.025 |
| | cerevisiae | | | | | |
| SP82 | Saccharomyces | Cell wall protein | 325 | 421 | 4 | 0.723 |
| | cerevisiae | | | | | |
| SP83 | Saccharomyces | Cell wall synthesis protein | 326 | 422 | 1 | 0.381 |
| | cerevisiae | | | | | |
| SP84 | Saccharomyces | Sterol binding protein | 327 | 423 | 4 | 0.491 |
| | cerevisiae | | | | | |
| SP85 | Saccharomyces | Cell Wall protein | 328 | 424 | 2 | 0.413 |
| | cerevisiae | | | | | |
| SP86 | Saccharomycopsis | Glucoamylase | 329 | 425 | 2 | 0.465 |
| | capsularis | | | | | |
| SP87 | Saccharomycopsis | Glucoamylase | 330 | 426 | 3 | 1.424 |
| | capsularis | | | | | |
| SP89 | Saitozyma flava | Glucoamylase | 332 | 428 | 1 | 0.889 |
| SP90 | Schwanniomyces | Glucoamylase | 333 | 429 | 2 | 1.876 |
| | occidentalis | | | | | |
| SP91 | Talaromyces | Beta-mannase | 334 | 430 | 4 | 0.861 |
| | leycetannus | | | | | |
| SP92 | Trichophaea sacatta | GH24 lysozyme | 335 | 431 | 4 | 0.46 |
| SP93 | Talaromyces | Glucoamylase | 336 | 432 | 1 | 0.562 |
| | emersonii | | | | | |
| SP94 | Trichoderma reesei | CBH 1 | 337 | 433 | 4 | 0.694 |
| SP95 | Trichoderma reesei | CBH 2 | 338 | 434 | 2 | 0.399 |

### Example 3: Glucoamylase Activity and Simultaneous Saccharification and Fermentation (SSF) of Yeast Strains Expressing a Glucoamylase Linked to a Unique Signal Sequence

[0741] This example describes the glucoamylase activity and simultaneous saccharification and fermentation (SSF) of yeast strains from Example 1 which express a heterologous alpha-amylase linked to a unique signal sequence. Preparation of yeast culture was conducted as described above in Example 2.

### Glucoamylase Activity Assay

[0742] Glucoamylase activity was detected by measuring the amount of glucose released through enzymatic hydrolysis of maltose. Glucose oxidase reagent was used to measure the glucose based on the color development from application of the reagent. The color intensity measured on a spectrophotometer or microplate reader is proportional to glucoamylase activity. Reaction conditions and color development were described in Table 9 and Table 10, respectively.

[0743] The Glucoamylase Unit (AGU) for standard glucoamylase assay is defined as the amount of enzyme that hydrolyzes one micromole maltose per minute under standard conditions.

TABLE 9
Glucoamylase reaction condition

| Amount of yeast supernatant | 20 | μl |
|---|---|---|
| Amount of substrate | 100 | μl |
| Substrate | Maltose, 60 mM | |
| Buffer | Sodium acetate, 0.1M, 0.01% Triton 100 | |
| pH | 5.0 ± 0.05 | |
| Incubation temperature | 20° | C. |
| Reaction time | 3 | hr |
| Glucoamylase assay range | 0.001-0.036 | AGU/ml |

TABLE 10
Color development

| | | |
|---|---|---|
| Reaction mixture | 20 | μl |
| Glucose oxidase reagent | 200 | μl |
| Incubation temperature | 20° | C. |
| Reaction time | 5 | min |
| Wavelength | 490 | nm |

### Preparation of Yeast Culture for Microtiter Plate Fermentations

[0744] Simultaneous saccharification and fermentation (SSF) was performed via mini-scale fermentations using industrial corn mash (Avantec Amp) under the reaction conditions shown in Table 11. Yeast strains were cultivated overnight in YPD media with 6% glucose for 24 hours at 30° C. and 300 rpm. The corn mash was supplemented with 250 ppm of urea. Approximately 0.6 mg of corn mash was dispensed per well to 96 well microtiter plates, followed by the addition of approximately 10\hat{ }8 yeast cells/g of corn mash from the overnight culture. Plates were incubated at 32° C. without shaking. Fermentation was stopped by the addition of 100 μL of 8% H₂SO₄, followed by centrifugation at 3000 rpm for 10 min. The supernatant was analyzed for ethanol using HPLC.

TABLE 11
Microtiter plate fermentation reaction conditions

| Substrate | Avantec Amp corn mash | |
|---|---|---|
| Yeast pitch | 10^{\hat{ }}8 cells/g corn mash | |
| Supplementary urea | 250 | ppm |
| pH | 5.0 ± 0.05 | |
| Incubation temperature | 32° | C. |
| Reaction time | 48 | hours |

### Results

[0745] The resulting data is shown in Table 12 where “Mean (glucose released)” indicates the glucose released (in triplicate) from the YPD based glucoamylase activity assay where the glucose released is proportional to glucoamylase activity. “Mean (normalized ethanol)” indicates ethanol at the 48-hour timepoint from three different simultaneous and saccharification fermentation (SSF) experiments, normalized to that of the strain without heterologous glucoamylase expression. As the data shows, more residual starch was released, and higher ethanol levels obtained from several yeast strains expressing a heterologous glucoamylase linked to a unique signal sequence.

TABLE 12

| | | | | | | Mean | |
|---|---|---|---|---|---|---|---|
| | | | | | | glucose | |
| | | | | Signal | | release | Mean |
| SP | | Donor Source | Signal | coding | # strain | (GA | normalized |
| number | Donor Organism | Peptide | SEQ ID | SEQ ID | isolates | activity) | ethanol |
| MBG | — | — | — | — | 16 | 0.121 | 1.000 |
| 4994 | | | | | | | |
| SP1 | Acremonium | GH25 lysozyme | 244 | 340 | 5 | 0.534 | 2.441 |
| | alcalophium | | | | | | |
| SP2 | Aspergillus | CBH 1 | 245 | 341 | 3 | 0.234 | 1.416 |
| | fumigatus | | | | | | |
| SP3 | Aspergillus | CBH 2 | 246 | 342 | 4 | 0.501 | 2.838 |
| | fumigatus | | | | | | |
| SP4 | Ambrosiozyma | Glucoamylase | 247 | 343 | 5 | 0.251 | 1.729 |
| | monospora | | | | | | |
| SP5 | Aspergillus oryzae | Alpha-amylase | 248 | 344 | 4 | 0.297 | 1.528 |
| SP6 | Candida blankii | Glucoamylase | 249 | 345 | 5 | 0.449 | 2.403 |
| SP7 | Candida | Glucoamylase | 250 | 346 | 4 | 0.453 | 2.536 |
| | homilentoma | | | | | | |
| SP8 | Candida | Glucoamylase | 251 | 347 | 5 | 0.346 | 2.209 |
| | silvanorum | | | | | | |
| SP9 | Dekkera | Glucoamylase | 252 | 348 | 6 | 0.178 | 1.209 |
| | bruxellensis | | | | | | |
| SP10 | Filobasidium | Glucoamylase | 253 | 349 | 3 | 0.269 | 1.728 |
| | capsuligenum | | | | | | |
| SP11 | Gloeophyllum | Glucoamylase | 254 | 350 | 3 | 0.244 | 1.348 |
| | sepiarium | | | | | | |
| SP12 | Gloeophyllum | Glucoamylase | 255 | 351 | 3 | 0.296 | 1.433 |
| | trabeum | | | | | | |
| SP13 | Homo sapiens | Alpha-2- | 256 | 352 | 2 | 0.406 | 2.206 |
| | | glycoprotein | | | | | |
| SP14 | Hyphopichia | Glucoamylase | 257 | 353 | 5 | 0.258 | 2.240 |
| | burtonii | | | | | | |
| SP15 | Kluyveromyces | polygalacturonase | 258 | 354 | 4 | 0.450 | 2.747 |
| | marxianus | | | | | | |
| SP16 | Nakazawaea | Glucoamylase | 259 | 355 | 5 | 0.162 | 1.242 |
| | ernobii | | | | | | |
| SP17 | Nakazawaea | Glucoamylase | 260 | 356 | 2 | 0.130 | 0.957 |
| | ernobii | | | | | | |
| SP18 | Ogataea | Glucoamylase | 261 | 357 | 3 | 0.188 | 1.251 |
| | methanolica | | | | | | |
| SP19 | Pycnoporus | Glucoamylase | 262 | 358 | 6 | 0.379 | 2.334 |
| | sanguineus | | | | | | |
| SP20 | Pichia pastoris | | 263 | 359 | 5 | 0.231 | 1.873 |
| SP21 | Pichia pastoris | | 264 | 360 | 2 | 0.326 | 2.091 |
| SP22 | Pichia pastoris | | 265 | 361 | 2 | 0.153 | 1.118 |
| SP23 | Pichia pastoris | | 266 | 362 | 4 | 0.354 | 2.064 |
| SP24 | Pichia pastoris | | 267 | 363 | 3 | 0.403 | 1.949 |
| SP25 | Pichia stipitis | Glucoamylase | 268 | 364 | 4 | 0.472 | 2.613 |
| SP26 | Rhizomucor | Alpha-amylase | 269 | 365 | 3 | 0.449 | 1.824 |
| | pusillus | | | | | | |
| SP27 | Saccharomycopsis | Glucoamylase | 270 | 366 | 4 | 0.332 | 1.850 |
| | fibuligera | | | | | | |
| SP28 | Saccharomyces | Invertase | 271 | 367 | 3 | 0.352 | 2.098 |
| | cerevisiae | | | | | | |
| SP29 | Saccharomyces | Adhesion subunit | 272 | 368 | 4 | 0.438 | 2.496 |
| | cerevisiae | of α-agglutinin | | | | | |
| SP30 | Saccharomyces | Chitin trans- | 273 | 369 | 3 | 0.279 | 1.779 |
| | cerevisiae | glycosylase | | | | | |
| SP31 | Saccharomyces | Exo-1,3-β | 274 | 370 | 3 | 0.369 | 2.413 |
| | cerevisiae | Glucanase | | | | | |
| SP32 | Saccharomyces | Phospholipase B | 275 | 371 | 5 | 0.578 | 2.329 |
| | cerevisiae | | | | | | |
| SP33 | Saccharomyces | Cell wall protein | 276 | 372 | 3 | 0.477 | 2.023 |
| | cerevisiae | related to | | | | | |
| | | glucanases | | | | | |
| SP34 | Saccharomyces | Mating | 277 | 373 | 4 | 0.491 | 1.865 |
| | cerevisiae | pheromone α- | | | | | |
| | | factor | | | | | |
| SP35 | Saccharomyces | Cell wall- | 278 | 374 | 2 | 0.460 | 2.046 |
| | cerevisiae | associated | | | | | |
| | | protein involved | | | | | |
| | | in export of | | | | | |
| | | acetylated sterols | | | | | |
| SP36 | Saccharomyces | Dolichyl- | 279 | 375 | 4 | 0.323 | 1.771 |
| | cerevisiae | diphosphooligosaccharide-- | | | | | |
| | | protein | | | | | |
| | | glycosyltransferase subunit 1 | | | | | |
| SP37 | Saccharomyces | Phospholipase B | 280 | 376 | 6 | 0.224 | 1.640 |
| | cerevisiae | | | | | | |
| SP38 | Saccharomyces | Exo-β-1,3- | 281 | 377 | 2 | 0.372 | 1.853 |
| | cerevisiae | Glucanase | | | | | |
| SP39 | Saccharomyces | Cell wall- | 282 | 378 | 3 | 0.407 | 2.506 |
| | cerevisiae | associated | | | | | |
| | | protein involved | | | | | |
| | | in export of | | | | | |
| | | acetylated sterols | | | | | |
| SP41 | Saccharomyces | Cell wall | 284 | 380 | 3 | 0.458 | 2.227 |
| | cerevisiae | mannoprotein | | | | | |
| SP42 | Saccharomyces | Cell wall | 285 | 381 | 3 | 0.460 | 2.180 |
| | cerevisiae | mannoprotein | | | | | |
| SP43 | Saccharomyces | Exo-1,3-β- | 286 | 382 | 4 | 0.434 | 2.429 |
| | cerevisiae | glucanase | | | | | |
| SP44 | Saccharomyces | Acid | 287 | 383 | 4 | 0.442 | 1.975 |
| | cerevisiae | phosphatase | | | | | |
| SP45 | Saccharomyces | Cell wall protein | 288 | 384 | 3 | 0.422 | 2.173 |
| | cerevisiae | | | | | | |
| SP46 | Saccharomyces | Acid | 289 | 385 | 4 | 0.479 | 2.240 |
| | cerevisiae | phosphatase | | | | | |
| SP47 | Saccharomyces | Acid | 290 | 386 | 3 | 0.446 | 2.278 |
| | cerevisiae | phosphatase | | | | | |
| SP49 | Saccharomyces | Protein Disulfide | 292 | 388 | 3 | 0.349 | 1.847 |
| | cerevisiae | Isomerase | | | | | |
| SP50 | Saccharomyces | | 293 | 389 | 2 | 0.177 | 1.087 |
| | cerevisiae | | | | | | |
| SP51 | Saccharomyces | Cell wall | 294 | 390 | 6 | 0.509 | 2.326 |
| | cerevisiae | mannoprotein | | | | | |
| SP53 | Saccharomyces | Exo-1,3-β | 296 | 392 | 4 | 0.549 | 2.767 |
| | cerevisiae | Glucanase | | | | | |
| SP54 | Saccharomyces | Chitin | 297 | 393 | 3 | 0.513 | 2.852 |
| | cerevisiae | transglycosylase | | | | | |
| SP55 | Saccharomyces | | 298 | 394 | 6 | 0.558 | 2.420 |
| | cerevisiae | | | | | | |
| SP57 | Saccharomyces | Endoprotease of | 300 | 396 | 4 | 0.467 | 2.792 |
| | cerevisiae | a-factor mating | | | | | |
| | | pheromone | | | | | |
| SP58 | Saccharomyces | Bud site selection | 301 | 397 | 3 | 0.128 | 0.935 |
| | cerevisiae | protein | | | | | |
| SP59 | Saccharomyces | Aspartic | 302 | 398 | 5 | 0.489 | 2.783 |
| | cerevisiae | proteinase | | | | | |
| | | yapsin-3 | | | | | |
| SP60 | Saccharomyces | Ferro-O2- | 303 | 399 | 4 | 0.492 | 2.363 |
| | cerevisiae | oxidoreductase | | | | | |
| SP61 | Saccharomyces | 1,3-beta- | 304 | 400 | 3 | 0.431 | 2.079 |
| | cerevisiae | glucanosyltransferase | | | | | |
| SP62 | Saccharomyces | Carboxypeptidase | 305 | 401 | 2 | 0.334 | 1.781 |
| | cerevisiae | | | | | | |
| SP63 | Saccharomyces | 1,3-beta- | 306 | 402 | 3 | 0.475 | 2.210 |
| | cerevisiae | glucanosyltransferase | | | | | |
| SP65 | Saccharomyces | Glycosylphosphatidylinositol | 308 | 404 | 3 | 0.474 | 2.820 |
| | cerevisiae | (GPI)-anchored cell wall | | | | | |
| | | endoglucanase | | | | | |
| SP66 | Saccharomyces | Endo-1,3(4)-beta- | 309 | 405 | 2 | 0.453 | 1.985 |
| | cerevisiae | glucanase 1 | | | | | |
| SP67 | Saccharomyces | Phospholipase B | 310 | 406 | 5 | 0.480 | 2.623 |
| | cerevisiae | | | | | | |
| SP68 | Saccharomyces | 1,3-beta- | 311 | 407 | 5 | 0.457 | 2.632 |
| | cerevisiae | glucanosyltransferase | | | | | |
| SP69 | Saccharomyces | Putative GPI- | 312 | 408 | 5 | 0.501 | 2.549 |
| | cerevisiae | anchored protein | | | | | |
| SP70 | Saccharomyces | VEL1-related | 313 | 409 | 2 | 0.430 | 2.251 |
| | cerevisiae | protein | | | | | |
| SP71 | Saccharomyces | Endo-beta-1,3- | 314 | 410 | 6 | 0.480 | 2.346 |
| | cerevisiae | glucanase | | | | | |
| SP72 | Saccharomyces | Seripauperin-3 | 315 | 411 | 3 | 0.466 | 2.073 |
| | cerevisiae | | | | | | |
| SP73 | Saccharomyces | Seripauperin-5 | 316 | 412 | 1 | 0.486 | 2.358 |
| | cerevisiae | | | | | | |
| SP74 | Saccharomyces | Cell wall | 317 | 413 | 3 | 0.424 | 2.744 |
| | cerevisiae | mannoprotein | | | | | |
| SP75 | Saccharomyces | GPI-anchored | 318 | 414 | 2 | 0.173 | 1.034 |
| | cerevisiae | cell surface | | | | | |
| | | glycoprotein | | | | | |
| | | (flocculin) | | | | | |
| SP76 | Saccharomyces | Cell wall | 319 | 415 | 5 | 0.500 | 2.584 |
| | cerevisiae | mannoprotein | | | | | |
| SP77 | Saccharomyces | Cold shock- | 320 | 416 | 4 | 0.443 | 2.415 |
| | cerevisiae | induced protein | | | | | |
| SP78 | Saccharomyces | Cell wall protein | 321 | 417 | 4 | 0.440 | 2.802 |
| | cerevisiae | | | | | | |
| SP79 | Saccharomyces | Stress-induced | 322 | 418 | 4 | 0.542 | 2.579 |
| | cerevisiae | structural GPI- | | | | | |
| | | cell wall | | | | | |
| | | glycoprotein | | | | | |
| SP80 | Saccharomyces | Mating | 323 | 419 | 6 | 0.358 | 2.482 |
| | cerevisiae | pheromone | | | | | |
| | | alpha-factor | | | | | |
| SP81 | Saccharomyces | Signaling mucin | 324 | 420 | 4 | 0.453 | 2.773 |
| | cerevisiae | | | | | | |
| SP82 | Saccharomyces | Cell wall protein | 325 | 421 | 2 | 0.528 | 2.382 |
| | cerevisiae | | | | | | |
| SP83 | Saccharomyces | Cell wall | 326 | 422 | 6 | 0.446 | 2.562 |
| | cerevisiae | synthesis protein | | | | | |
| SP84 | Saccharomyces | Sterol binding | 327 | 423 | 5 | 0.476 | 2.548 |
| | cerevisiae | protein | | | | | |
| SP85 | Saccharomyces | Cell Wall protein | 328 | 424 | 8 | 0.514 | 2.236 |
| | cerevisiae | | | | | | |
| SP86 | Saccharomycopsis | Glucoamylase | 329 | 425 | 7 | 0.565 | 2.315 |
| | capsularis | | | | | | |
| SP88 | Saccharomycopsis | Glucoamylase | 331 | 427 | 3 | 0.311 | 1.685 |
| | fibuligera | | | | | | |
| SP90 | Schwanniomyces | Glucoamylase | 333 | 429 | 6 | 0.121 | 1.047 |
| | occidentalis | | | | | | |
| SP91 | Talaromyces | Beta-mannase | 334 | 430 | 2 | 0.431 | 2.279 |
| | leycetannus | | | | | | |
| SP92 | Trichophaea | GH24 lysozyme | 335 | 431 | 4 | 0.480 | 2.707 |
| | sacatta | | | | | | |
| SP93 | Talaromyces | Glucoamylase | 336 | 432 | 4 | 0.337 | 1.818 |
| | emersonii | | | | | | |
| SP94 | Trichoderma reesei | CBH 1 | 337 | 433 | 3 | 0.235 | 1.385 |
| SP95 | Trichoderma reesei | CBH 2 | 338 | 434 | 4 | 0.393 | 2.408 |
| SP96 | Humicola insolens | Cel45 | 339 | 435 | 2 | 0.391 | 1.826 |

### Example 4: Construction of Yeast Strains Expressing a Heterologous Beta-Glucosidase or Protease Linked to a Signal Peptide

[0746] This example describes the construction of yeast cells containing a β-glucosidase or PepA protease linked to a unique signal sequence under control of the S. cerevisae TDH3 promoter. Three DNA containing the promoter, signal peptide, gene, and terminator were designed to allow for homologous recombination between the three DNA fragments and into the X-3 locus of yeast MBG4994 (See, WO2019/148192). The resulting strains contain one promoter-containing fragment (left fragment), one signal peptide-containing fragment with homology to the promoter and terminator, and one gene and PRM9 terminator fragment (right fragment) integrated into the X-3 locus of the S. cerevisiae genome.

### Construction of the Promoter-Containing Fragments (Left Fragments)

[0747] Linear DNA containing 300 bp homology to the 5′ X-3 site and the S. cerevisiae TDH3 promoter (SEQ ID NO: 1) was PCR amplified from HP17-G11 (a strain previously engineered to have the TDH3 promoter at the X-3 site) genomic DNA with primers 1221757 (5′-AGCACA ATCCA AGGAA AAATC TGGCC-3′; SEQ ID NO: 436) and 1226246 (5′-TTTGT TTGTT TATGT GTGTT TATTC G-3′; SEQ ID NO: 437). 50 pmoles each of forward and reverse primer was used in a PCR reaction containing 10 ng of HP17-G11 DNA as template, 10 mM dNTP mix, 5× Phusion HF Buffer (Thermo Fisher Scientific) and 2 units Phusion Hot Start DNA polymerase in a final volume of 50 μL. The PCR was performed in a T100™ Thermal Cycler (Bio-Rad Laboratories, Inc.) programmed for one cycle at 98° C. for 3 minutes, followed by 32 cycles each at 98° C. for 10 seconds, 55° C. for 20 seconds, and 72° C. for 1 minute 15 seconds, with a final extension at 72° C. for 5 minutes. After thermocycler reaction, the PCR reaction products were run in a 0.7% TBE agarose gel at 120 volts for 60 minutes, gel isolated, and cleaned up using the NucleoSpin Gel and PCR clean-up kit (Machery-Nagel).

### Construction of the Signal Peptide-Containing Fragments (Middle Fragments)

[0748] Synthetic linear uncloned DNA containing the 125 bp homology to the S. cerevisiae TDH3 promoter (SEQ ID NO: 1), unique signal peptide, and 130 bp homology of the 5′ end of the mature β-glucosidase coding sequence was synthesized by Twist Bioscience (San Francisco, Calif.). Similarly, linear uncloned DNA but containing 130 bp of the 5′ end of the mature PepA protease coding sequence was synthesized by Twist Bioscience (San Francisco, Calif.).

### Construction of the Gene and Terminator-Containing Fragment (Right Fragment)

[0749] The linear DNA containing the mature β-glucosidase coding sequence, PRM9 terminator (SEQ ID NO: 243) and X-3 3′ homology was ordered from GeneArt as cloned synthetic DNA. To generate linear DNA, PCR was done to amplify the cassette from 16ABXBZP synthetic DNA with primers 1227660 (5′-CAGGA ACTTG CATTC TCTCC-3′; SEQ ID NO: 444) and 1220656 (5′-TTTTC GCTCT TGAGC TTGTC-3′; SEQ ID NO: 445). 50 pmoles each of forward and reverse primer was used in a PCR reaction containing 10 ng of synthetic DNA 16ABXBZP as template, 10 mM dNTP mix, 5× Phusion HF Buffer (Thermo Fisher Scientific) and 2 units Phusion Hot Start DNA polymerase in a final volume of 50 μL. The PCR was performed in a T100™ Thermal Cycler (Bio-Rad Laboratories, Inc.) programmed for one cycle at 98° C. for 3 minutes, followed by 32 cycles each at 98° C. for 10 seconds, 55° C. for 20 seconds, and 72° C. for 3 minutes, with a final extension at 72° C. for 5 minutes. After thermocycler reaction, the PCR reaction products were run in a 0.7% TBE agarose gel at 120 volts for 60 minutes, gel isolated, and cleaned up using the NucleoSpin Gel and PCR clean-up kit (Machery-Nagel).

[0750] The linear DNA containing the mature PepA protease mature peptide coding sequence PRM9 terminator (SEQ ID NO: 243) and X-3 3′ homology was PCR amplified from CPF33-C07 (a strain previously engineered to have the protease gene with the RPM9 terminator at the X-3 locus) genomic DNA using primers 1221474 (5′-TTTTG GTTGA TTATC CGGCT TCCAA CC-3′; SEQ ID NO: 446) and 1227661 (5′-GCACC AGCTC CAACC AG-3′; SEQ ID NO: 447). 50 pmoles each of forward and reverse primer was used in a PCR reaction containing 10 ng of genomic DNA as template, 10 mM dNTP mix, 5× Phusion HF Buffer (Thermo Fisher Scientific) and 2 units Phusion Hot Start DNA polymerase in a final volume of 50 μL. The PCR was performed in a T100™ Thermal Cycler (Bio-Rad Laboratories, Inc.) programmed for one cycle at 98° C. for 3 minutes, followed by 32 cycles each at 98° C. for 10 seconds, 57° C. for 20 seconds, and 72° C. for 2 minutes, with a final extension at 72° C. for 5 minutes. After thermocycler reaction, the PCR reaction products were run in a 0.7% TBE agarose gel at 120 volts for 60 minutes, gel isolated, and cleaned up using the NucleoSpin Gel and PCR clean-up kit (Machery-Nagel).

### Integration of the Left, Middle, and Right-Hand Fragments to Generate Yeast Strains Expressing a Heterologous β-Glucosidase or Heterologous Protease Linked to a Unique Signal Peptide

[0751] For the generation of β-glucosidase-expressing strains, MBG4994 was transformed with the left, middle, and right integration fragments described above. In each transformation pool, 200 ng of the fixed left fragment and 400 ng of the fixed right fragment was used. The middle fragment consisted of the unique signal peptide and 30 ng was used for each pool. To aid in homologous recombination of the left, middle, and right fragments at the genomic X-3 sites, 500 ng of a plasmid containing Cas9 and guide RNA specific to X-3 (pMCTS442) was also used in the transformation. These four components were transformed into MBG4994, following a yeast electroporation protocol. Transformants were selected on YPD+cloNAT to select for transformants that contain the Cas9 plasmid pMCTS442. Transformants were picked using a Q-pix Colony Picking System (Molecular Devices) to inoculate 1 colony-well of 96-well plates containing YPD+cloNAT media. The plates were grown for 2 days at 30° C., then glycerol was added to 20% final concentration and the plates were stored at −80° C. until needed. Integration of the cassette at X-3 was verified by PCR with primers 1218018 (5′-GTTAC TGTTG TCCAC AGGC-3′; SEQ ID NO: 442) and 1218019 (5′-CTTGC TGCAT GGAGA CAAGT G-3′; SEQ ID NO: 443) and NGS sequencing of the amplicon. Table 13 shows the number of strain isolates for each unique signal peptide with beta-glucosidase after sequencing that was then used in the below described activity assays.

[0752] For the generation of protease-expressing strains, MBG4994 was transformed with the left, middle, and right integration fragments described above. In each transformation pool, 200 ng of the fixed left fragment and 300 ng of the fixed right fragment was used. The middle fragment consisted of the unique signal peptide and 30 ng was used. To aid in homologous recombination of the left, middle, and right fragments at the genomic X-3 sites, 500 ng of a plasmid containing Cas9 and guide RNA specific to X-3 (pMCTS442) was also used in the transformation. These four components were transformed into MBG4994, following a yeast electroporation protocol. Transformants were selected on YPD+cloNAT to select for transformants that contain the Cas9 plasmid pMCTS442. Transformants were picked using a Q-pix Colony Picking System (Molecular Devices) to inoculate 1 colony-well of 96-well plates containing YPD+cloNAT media. The plates were grown for 2 days at 30° C., then glycerol was added to 20% final concentration and the plates were stored at −80° C. until needed. Integration of the cassette at X-3 was verified by PCR with primers 1218018 (5′-GTTAC TGTTG TCCAC AGGC-3′; SEQ ID NO: 442) and 1218020 (5′-GAGAT GGCCT ATTGA TATCA AG-3′; SEQ ID NO: 448) and NGS sequencing of the amplicon.

### Example 5: Protease Activity of Yeast Strains Expressing a Protease Linked to a Unique Signal Sequence

[0753] This example describes the protease activity of yeast strains from Example 4 which express a heterologous protease linked to a unique signal sequence.

### Preparation of Yeast Culture Supernatant for Enzyme Activity Assay

[0754] Yeast strains were cultivated for 48 hours in standard YPD media containing 2% glucose. The cultured yeast medium was centrifuged at 3000 rpm for 10 min to collect the supernatant. The supernatant was used for enzyme activity assay, as described below.

### Protease Activity Assay

[0755] Protease activity was detected by measuring fluorescently labelled peptide products cleaved during protease catalyzed hydrolysis of intramolecularly quenched protease substrate (EnzChek by Invitrogen) and yeast supernatant. Fluorescence output of samples indicate the amount of protease activity detected. Reaction conditions are described below in Table 13.

TABLE 13
Protease reaction conditions

| Amount of yeast supernatant | 100 | μl |
|---|---|---|
| Amount of substrate | 100 | μl |
| Substrate | BODIPY FL casein in | |
| | PBS (phosphate-buffered saline), 1 mg/mL | |
| Buffer | Sodium acetate, 0.1M, 0.01% Triton 100 | |
| pH | 5.0 ± 0.05 | |
| Incubation temperature | 37° | C. |
| Reaction time | 18-24 | hr |

| | |
|---|---|
| Fluorescence | 485 nm/530 nm |
| excitation/emission | |

### Results

[0756] The resulting data is shown in Table 14 where “Mean normalized protease activity” indicates protease activity normalized to that of the strain without heterologous protease expression.

TABLE 14

| | | | | | | | Mean |
|---|---|---|---|---|---|---|---|
| | | | | Signal | | Mean Protease | normalized |
| SP | | | Signal | coding | # strain | activity | protease |
| number | Donor Organism | Donor Source Peptide | SEQ ID | SEQ ID | isolates | (485EX530EM)) | activity |
| MBG | — | — | — | — | 1 | 232217.4 | 1 |
| 4994 | | | | | | | |
| SP1 | Acremonium | GH25 lysozyme | 244 | 340 | 5 | 333116.6 | 1.4344 |
| | alcalophium | | | | | | |
| SP3 | Aspergillus | CBH 2 | 246 | 342 | 5 | 319260 | 1.3748 |
| | fumigatus | | | | | | |
| SP6 | Candida blankii | Glucoamylase | 249 | 345 | 5 | 336613.8 | 1.4496 |
| SP7 | Candida | Glucoamylase | 250 | 346 | 5 | 323400.4 | 1.3926 |
| | homilentoma | | | | | | |
| SP15 | Kluyveromyces | polygalacturonase | 258 | 354 | 5 | 323499.2 | 1.3932 |
| | marxianus | | | | | | |
| SP25 | Pichia stipitis | Glucoamylase | 268 | 364 | 5 | 345434.4 | 1.4876 |
| SP26 | Rhizomucor | Alpha-amylase | 269 | 365 | 5 | 386169.8 | 1.6628 |
| | pusillus | | | | | | |
| SP28 | Saccharomyces | Invertase | 271 | 367 | 5 | 340802.8 | 1.4676 |
| | cerevisiae | | | | | | |
| SP32 | Saccharomyces | Phospholipase B | 275 | 371 | 5 | 339122 | 1.4602 |
| | cerevisiae | | | | | | |
| SP33 | Saccharomyces | Cell wall protein related to | 276 | 372 | 5 | 346348.8 | 1.4914 |
| | cerevisiae | glucanases | | | | | |
| SP34 | Saccharomyces | Mating pheromone α-factor | 277 | 373 | 5 | 376331.4 | 1.6206 |
| | cerevisiae | | | | | | |
| SP35 | Saccharomyces | Cell wall-associated protein | 278 | 374 | 5 | 335899.6 | 1.4464 |
| | cerevisiae | involved in export of | | | | | |
| | | acetylated sterols | | | | | |
| SP36 | Saccharomyces | Dolichyl- | 279 | 375 | 5 | 331389.8 | 1.4272 |
| | cerevisiae | diphosphooligosaccharide-- | | | | | |
| | | protein glycosyltransferase | | | | | |
| | | subunit 1 | | | | | |
| SP38 | Saccharomyces | Exo-β-1,3-Glucanase | 281 | 377 | 5 | 361318.2 | 1.5558 |
| | cerevisiae | | | | | | |
| SP39 | Saccharomyces | Cell wall-associated protein | 282 | 378 | 5 | 265864.2 | 1.145 |
| | cerevisiae | involved in export of | | | | | |
| | | acetylated sterols | | | | | |
| SP42 | Saccharomyces | Cell wall mannoprotein | 285 | 381 | 5 | 326871.6 | 1.4078 |
| | cerevisiae | | | | | | |
| SP46 | Saccharomyces | Acid phosphatase | 289 | 385 | 5 | 309714.4 | 1.3336 |
| | cerevisiae | | | | | | |
| SP49 | Saccharomyces | Protein Disulfide Isomerase | 292 | 388 | 5 | 343756.2 | 1.4804 |
| | cerevisiae | | | | | | |
| SP53 | Saccharomyces | Exo-1,3-β Glucanase | 296 | 392 | 5 | 310303 | 1.3362 |
| | cerevisiae | | | | | | |
| SP54 | Saccharomyces | Chitin transglycosylase | 297 | 393 | 5 | 360657.8 | 1.553 |
| | cerevisiae | | | | | | |
| SP55 | Saccharomyces cerevisiae | | 298 | 394 | 5 | 402207.2 | 1.732 |
| SP57 | Saccharomyces | Endoprotease of a-factor | 300 | 396 | 5 | 314108.4 | 1.3528 |
| | cerevisiae | mating pheromone | | | | | |
| SP59 | Saccharomyces | Aspartic proteinase yapsin-3 | 302 | 398 | 5 | 374435.2 | 1.6124 |
| | cerevisiae | | | | | | |
| SP60 | Saccharomyces | Ferro-O2-oxidoreductase | 303 | 399 | 5 | 342080.6 | 1.473 |
| | cerevisiae | | | | | | |
| SP61 | Saccharomyces | 1,3-beta- | 304 | 400 | 5 | 316246.6 | 1.362 |
| | cerevisiae | glucanosyltransferase | | | | | |
| SP63 | Saccharomyces | 1,3-beta- | 306 | 402 | 5 | 318807 | 1.3728 |
| | cerevisiae | glucanosyltransferase | | | | | |
| SP65 | Saccharomyces | Glycosylphosphatidylinositol | 308 | 404 | 5 | 336489.2 | 1.4492 |
| | cerevisiae | (GPI)-anchored cell wall | | | | | |
| | | endoglucanase | | | | | |
| SP66 | Saccharomyces | Endo-1,3(4)-beta-glucanase 1 | 309 | 405 | 5 | 339398.4 | 1.4616 |
| | cerevisiae | | | | | | |
| SP67 | Saccharomyces | Phospholipase B | 310 | 406 | 5 | 356105 | 1.5334 |
| | cerevisiae | | | | | | |
| SP69 | Saccharomyces | Putative GPI-anchored | 312 | 408 | 5 | 388807 | 1.6744 |
| | cerevisiae | protein | | | | | |
| SP71 | Saccharomyces | Endo-beta-1,3-glucanase | 314 | 410 | 5 | 344119.6 | 1.482 |
| | cerevisiae | | | | | | |
| SP72 | Saccharomyces | Seripauperin-3 | 315 | 411 | 5 | 353396.4 | 1.5216 |
| | cerevisiae | | | | | | |
| SP74 | Saccharomyces | Cell wall mannoprotein | 317 | 413 | 5 | 278426.6 | 1.199 |
| | cerevisiae | | | | | | |
| SP76 | Saccharomyces | Cell wall mannoprotein | 319 | 415 | 5 | 336394.8 | 1.4488 |
| | cerevisiae | | | | | | |
| SP77 | Saccharomyces | Cold shock-induced protein | 320 | 416 | 5 | 307872 | 1.3258 |
| | cerevisiae | | | | | | |
| SP78 | Saccharomyces | Cell wall protein | 321 | 417 | 5 | 302769.6 | 1.304 |
| | cerevisiae | | | | | | |
| SP79 | Saccharomyces | Stress-induced structural | 322 | 418 | 5 | 342173.6 | 1.4736 |
| | cerevisiae | GPI-cell wall glycoprotein | | | | | |
| SP80 | Saccharomyces | Mating pheromone alpha-factor | 323 | 419 | 5 | 368249.2 | 1.5858 |
| | cerevisiae | | | | | | |
| SP82 | Saccharomyces | Cell wall protein | 325 | 421 | 5 | 358633.8 | 1.5444 |
| | cerevisiae | | | | | | |
| SP83 | Saccharomyces | Cell wall synthesis protein | 326 | 422 | 5 | 350048.4 | 1.5074 |
| | cerevisiae | | | | | | |
| SP84 | Saccharomyces | Sterol binding protein | 327 | 423 | 5 | 293716.6 | 1.2646 |
| | cerevisiae | | | | | | |
| SP85 | Saccharomyces | Cell Wall protein | 328 | 424 | 5 | 364964.2 | 1.5716 |
| | cerevisiae | | | | | | |
| SP86 | Saccharomycopsis | Glucoamylase | 329 | 425 | 5 | 380894.2 | 1.6402 |
| | capsularis | | | | | | |
| SP91 | Talaromyces | Beta-mannase | 334 | 430 | 5 | 337937 | 1.455 |
| | leycetannus | | | | | | |
| SP92 | Trichophaea | GH24 lysozyme | 335 | 431 | 5 | 369680 | 1.592 |
| | sacatta | | | | | | |
| SP95 | Trichoderma | CBH 2 | 338 | 434 | 5 | 344838.6 | 1.485 |
| | reesei | | | | | | |
| SP96 | Humicola insolens | Cel45 | 339 | 435 | 5 | 286559.2 | 1.2342 |

### Example 6: Beta-Glucosidase Activity of Yeast Strains Expressing a Beta-Glucosidase Linked to a Unique Signal Sequence

[0757] This example describes the beta-glucosidase activity of yeast strains from Example 4 which express a heterologous beta-glucosidase linked to a unique signal sequence.

[0758] Strains were propagated for the beta-glucosidase activity assay by inoculating 5 uL of culture into 150 uL of YP+2% glucose. The strains were incubated overnight at 30 C and 300 PRM. The following day, 5 uL of the seed culture was transferred to two fermentation plates containing 150 uL of YP+2% glucose. The fermentation plates were incubated at 30 C and 300 RPM overnight. The absorbance of both fermentation plates was read at just after inoculation and at the end of the fermentation for confirmation of growth. The fermentation plates were centrifuged at 3000 RPM for 10 minutes, and the supernatant was diluted to 2× in deionized water for the β-glucosidase assay.

[0759] A cellobiose standard curve was generated at concentrations of 0.4, 0.3, 0.2, 0.1, 0.05, 0.025, 0.0125, and 0 CBUB/mL. Substrate was prepared by diluting 1 mL of the 50 mg/mL stock of para-nitrophenyl-β-D-glucopyranoside substrate in 49 mL of 0.1M succinate pH5.0 buffer solution for a final concentration of 1 mg/mL.

[0760] A total of 200 uL of substrate was combined with 20 uL of each sample or standard in a clear 96-well flat bottom plate. The plate was incubated at room temperature for 45 minutes. The reaction was quenched with 50 uL/well of 1M Tris pH 9 and the absorbance was read at OD405. The CBUB/mL concentration of each sample was calculated based off the standard curve. The resulting data is shown in Table 15 where “Mean normalized Beta-glucosidase activity” indicates beta-glucosidase activity normalized to that of the strain without heterologous beta-glucosidase activity expression.

TABLE 15

| | | | | | | | Mean |
|---|---|---|---|---|---|---|---|
| | | | | | | | normalized |
| | | | | | | Mean Beta- | Beta- |
| | | | | Signal | | glucosidase | glucosidase |
| SP | | | Signal | coding | # strain | activity | activity |
| number | Donor Organism | Donor Source Peptide | SEQ ID | SEQ ID | isolates | (CBUB/mL) | (CBUB/mL) |
| MBG | — | — | — | — | — | 0.002607 | 1 |
| 4994 | | | | | | | |
| SP1 | Acremonium | GH25 lysozyme | 244 | 340 | 5 | 0.169694 | 65.088 |
| | alcalophium | | | | | | |
| SP3 | Aspergillus | CBH 2 | 246 | 342 | 4 | 0.156803 | 60.1425 |
| | fumigatus | | | | | | |
| SP6 | Candida blankii | Glucoamylase | 249 | 345 | 3 | 0.196552 | 75.39 |
| SP7 | Candida | Glucoamylase | 250 | 346 | 5 | 0.164513 | 63.104 |
| | homilentoma | | | | | | |
| SP15 | Kluyveromyces | polygalacturonase | 258 | 354 | 4 | 0.210611 | 80.7775 |
| | marxianus | | | | | | |
| SP25 | Pichia stipitis | Glucoamylase | 268 | 364 | 5 | 0.177965 | 68.26 |
| SP26 | Rhizomucor | Alpha-amylase | 269 | 365 | 5 | 0.159744 | 61.27 |
| | pusillus | | | | | | |
| SP28 | Saccharomyces | Invertase | 271 | 367 | 4 | 0.164931 | 63.2625 |
| | cerevisiae | | | | | | |
| SP32 | Saccharomyces | Phospholipase B | 275 | 371 | 5 | 0.13675 | 52.452 |
| | cerevisiae | | | | | | |
| SP33 | Saccharomyces | Cell wall protein related to | 276 | 372 | 5 | 0.196733 | 75.458 |
| | cerevisiae | glucanases | | | | | |
| SP34 | Saccharomyces | Mating pheromone α- | 277 | 373 | 5 | 0.255084 | 97.84 |
| | cerevisiae | factor | | | | | |
| SP35 | Saccharomyces | Cell wall-associated | 278 | 374 | 2 | 0.203978 | 78.235 |
| | cerevisiae | protein involved in export | | | | | |
| | | of acetylated sterols | | | | | |
| SP36 | Saccharomyces | Dolichyl- | 279 | 375 | 5 | 0.201933 | 77.454 |
| | cerevisiae | diphosphooligosaccharide-- | | | | | |
| | | protein | | | | | |
| | | glycosyltransferase | | | | | |
| | | subunit 1 | | | | | |
| SP39 | Saccharomyces | Cell wall-associated | 282 | 378 | 10 | 0.140722 | 53.976 |
| | cerevisiae | protein involved in export | | | | | |
| | | of acetylated sterols | | | | | |
| SP42 | Saccharomyces | Cell wall mannoprotein | 285 | 381 | 3 | 0.245882 | 94.31 |
| | cerevisiae | | | | | | |
| SP46 | Saccharomyces | Acid phosphatase | 289 | 385 | 3 | 0.236497 | 90.71 |
| | cerevisiae | | | | | | |
| SP49 | Saccharomyces | Protein Disulfide | 292 | 388 | 4 | 0.145681 | 55.875 |
| | cerevisiae | Isomerase | | | | | |
| SP53 | Saccharomyces | Exo-1,3-β Glucanase | 296 | 392 | 4 | 0.148525 | 56.97 |
| | cerevisiae | | | | | | |
| SP54 | Saccharomyces | Chitin transglycosylase | 297 | 393 | 5 | 0.082677 | 31.712 |
| | cerevisiae | | | | | | |
| SP55 | Saccharomyces cerevisiae | | 298 | 394 | 10 | 0.181574 | 69.645 |
| SP57 | Saccharomyces | Endoprotease of a-factor | 300 | 396 | 5 | 0.169187 | 64.894 |
| | cerevisiae | mating pheromone | | | | | |
| SP59 | Saccharomyces | Aspartic proteinase | 302 | 398 | 5 | 0.250197 | 95.966 |
| | cerevisiae | yapsin-3 | | | | | |
| SP60 | Saccharomyces | Ferro-O2-oxidoreductase | 303 | 399 | 5 | 0.163846 | 62.844 |
| | cerevisiae | | | | | | |
| SP61 | Saccharomyces | 1,3-beta- | 304 | 400 | 4 | 0.173143 | 66.41 |
| | cerevisiae | glucanosyltransferase | | | | | |
| SP63 | Saccharomyces | 1,3-beta- | 306 | 402 | 5 | 0.221625 | 85.008 |
| | cerevisiae | glucanosyltransferase | | | | | |
| SP65 | Saccharomyces | Glycosylphosphatidylinositol (GPI)-anchored cell | 308 | 404 | 4 | 0.170972 | 65.5775 |
| | cerevisiae | wall endoglucanase | | | | | |
| SP66 | Saccharomyces | Endo-1,3(4)-beta- | 309 | 405 | 4 | 0.160974 | 61.745 |
| | cerevisiae | glucanase 1 | | | | | |
| SP67 | Saccharomyces | Phospholipase B | 310 | 406 | 4 | 0.115719 | 44.385 |
| | cerevisiae | | | | | | |
| SP71 | Saccharomyces | Endo-beta-1,3-glucanase | 314 | 410 | 4 | 0.130007 | 49.865 |
| | cerevisiae | | | | | | |
| SP72 | Saccharomyces | Seripauperin-3 | 315 | 411 | 3 | 0.242037 | 92.83667 |
| | cerevisiae | | | | | | |
| SP73 | Saccharomyces | Seripauperin-5 | 316 | 412 | 4 | 0.239889 | 92.01 |
| | cerevisiae | | | | | | |
| SP74 | Saccharomyces | Cell wall mannoprotein | 317 | 413 | 4 | 0.162164 | 62.1975 |
| | cerevisiae | | | | | | |
| SP76 | Saccharomyces | Cell wall mannoprotein | 319 | 415 | 5 | 0.176861 | 67.838 |
| | cerevisiae | | | | | | |
| SP77 | Saccharomyces | Cold shock-induced | 320 | 416 | 5 | 0.189593 | 72.72 |
| | cerevisiae | protein | | | | | |
| SP78 | Saccharomyces | Cell wall protein | 321 | 417 | 4 | 0.128474 | 49.2775 |
| | cerevisiae | | | | | | |
| SP79 | Saccharomyces | Stress-induced structural | 322 | 418 | 5 | 0.253145 | 97.094 |
| | cerevisiae | GPI-cell wall glycoprotein | | | | | |
| SP80 | Saccharomyces | Mating pheromone alpha-factor | 323 | 419 | 5 | 0.073282 | 28.108 |
| | cerevisiae | | | | | | |
| SP82 | Saccharomyces | Cell wall protein | 325 | 421 | 5 | 0.225858 | 86.632 |
| | cerevisiae | | | | | | |
| SP83 | Saccharomyces | Cell wall synthesis protein | 326 | 422 | 5 | 0.172372 | 66.116 |
| | cerevisiae | | | | | | |
| SP84 | Saccharomyces | Sterol binding protein | 327 | 423 | 5 | 0.204961 | 78.614 |
| | cerevisiae | | | | | | |
| SP85 | Saccharomyces | Cell Wall protein | 328 | 424 | 4 | 0.192924 | 73.995 |
| | cerevisiae | | | | | | |
| SP86 | Saccharomycopsis | Glucoamylase | 329 | 425 | 5 | 0.189081 | 72.524 |
| | capsularis | | | | | | |
| SP91 | Talaromyces | Beta-mannase | 334 | 430 | 5 | 0.166594 | 63.898 |
| | leycetannus | | | | | | |
| SP92 | Trichophaea | GH24 lysozyme | 335 | 431 | 5 | 0.153216 | 58.768 |
| | sacatta | | | | | | |
| SP95 | Trichoderma | CBH 2 | 338 | 434 | 3 | 0.201005 | 77.09667 |
| | reesei | | | | | | |
| SP96 | Humicola insolens | Cel45 | 339 | 435 | 5 | 0.145204 | 55.694 |

The application's sequence listing, which the Patent Office published only in electronic form, follows.

SEQUENCE LISTING (448 sequences)

SEQ ID NO: 1 - DNA, 621 bp, Saccharomyces cerevisiae
cagttcgagtttatcattatcaatactgccatttcaaagaatacgtaaataattaatagtagtgattttcctaactttatttagtcaaaaaattagccttttaattctgctgtaacccgtacatgcccaaaatagggggcgggttacacagaatatataacatcgtaggtgtctgggtgaacagtttattcctggcatccactaaatataatggagcccgctttttaagctggcatccagaaaaaaaaagaatcccagcaccaaaatattgttttcttcaccaaccatcagttcataggtccattctcttagcgcaactacagagaacaggggcacaaacaggcaaaaaacgggcacaacctcaatggagtgatgcaacctgcctggagtaaatgatgacacaaggcaattgacccacgcatgtatctatctcattttcttacaccttctattaccttctgctctctctgatttggaaaaagctgaaaaaaaaggttgaaaccagttccctgaaattattcccctacttgactaataagtatataaagacggtaggtattgattgtaattctgtaaatctatttcttaaacttcttaaattctacttttatagttagtctt

SEQ ID NO: 2 - DNA, 644 bp, Saccharomyces cerevisiae
agctacctatattccaccataatatcaatcatgcggttgctggtgtatttaccaataatgtttaatgtatatatattaggggccgtatacttacatatagtagatgtcaagcgtaggcgcttcccctgccggctgtgacggcgccataaccaaggtatctatagaccgccaatcagcaaactacctccgtacattcatgttgcacccacacatgtacacacccagaccgcaacaaattacccataaggttgtttgtgacggcgtcgtacaagagaacgtgggaactttttaggctcaccaaaaaagaaaggaaaaatacgagttgctgacagaagcctcaagaaaaaaaaaattcttcttcgactatgctggaggcagagatgatcgagccggtagttaactatatatagctaaattggttccatcaccttcttttctggtgtcgctccttctagtgctatttctggcttttcctattttttttttttccatttttctttctctctttctaatatataaattctcttgcattttctatttttctctctatctattctacttgtttattcccttcaaggtttttttttaaggagtacttgtttttagaatatacggtcaacgaactataattaagctagaacaaa

SEQ ID NO: 3 - DNA, 457 bp, Saccharomyces cerevisiae
ctccagaaaggcaacgcaaaattttttttccagggaataaactttctatgacccactacttctcgtaggaacaatttcgggcccctgcgtgttcttctgaggttcatcttttacatttgcttctgctggataattttcagaggcaacaaggaaaaattagatggcaaaaagtcgtctttcaaggaaaaatccccaccatccttcgagatcccctgtaacttattggcaactgaaagaatgaaaaggaggaaaatacaaaatatactagaactgaaaaaaaaaagtataaatagagacgatatatgccaatacttcacaatgttcgaatccattcttcatttgcagctattgtaaaataataaaacatcaagaacaaacaagctcaacttgtcttttctaagaacaaagaataaacacaaaaacaaaaagtttttttaattttaatcgctagaacaaa

SEQ ID NO: 4 - DNA, 700 bp, Saccharomyces cerevisiae
gtgagtaaggaaagagtgaggaactatcgcatacctgcatttaaagatgccgatttgggcgcgaatcctttattttggcttcaccctcatactattatcagggccagaaaaaggaagtgtttccctccttcttgaattgatgttaccctcataaagcacgtggcctcttatcgagaaagaaattaccgtcgctcgtgatttgtttgcaaaaagaacaaaactgaaaaaacccagacacgctcgacttcctgtcatcctattgattgcagcttccaatttcgtcacacaacaaggtcctagcgacggctcacaggttttgtaacaagcaatcgaaggttctggaatggcgggaaagggtttagtaccacatgctatgatgcccactgtgatctccagagcaaagttcgttcgatcgtactgttactctctctctttcaaacagaattgtccgaatcgtgtgacaacaacagcctgttctcacacactcttttcttctaaccaagggggtggtttagtttagtagaacctcgtgaaacttacatttacatatatataaacttgcataaattggtcaatgcaagaaatacatatttggtcttttctaattcgtagtttttcaagttcttagatgctttctttttctcttttttacagatcatcaaggaagtaattatctactttttacaacaaatataaaaca

SEQ ID NO: 5 - DNA, 705 bp, Sacharromyces cerevisiae
atccttttgttgtttccgggtgtacaatatggacttcctcttttctggcaaccaaacccatacatcgggattcctataataccttcgttggtctccctaacatgtaggtggcggaggggagatatacaatagaacagataccagacaagacataatgggctaaacaagactacaccaattacactgcctcattgatggtggtacataacgaactaatactgtagccctagacttgatagccatcatcatatcgaagtttcactaccctttttccatttgccatctattgaagtaataataggcgcatgcaacttcttttctttttttttcttttctctctcccccgttgttgtctcaccatatccgcaatgacaaaaaaatgatggaagacactaaaggaaaaaattaacgacaaagacagcaccaacagatgtcgttgttccagagctgatgaggggtatctcgaagcacacgaaactttttccttccttcattcacgcacactactctctaatgagcaacggtatacggccttccttccagttacttgaatttgaaataaaaaaaagtttgctgtcttgctatcaagtataaatagacctgcaattattaatcttttgtttcctcgtcattgttctcgttccctttcttccttgtttctttttctgcacaatatttcaagctataccaagcatacaatcaact

SEQ ID NO: 6 - DNA, 700 bp, Saccharomyces cerevisiae
aagaggatgtccaatattttttttaaggaataaggatacttcaagactagattcccccctgcattcccatcagaaccgtaaaccttggcgctttccttgggaagtattcaagaagtgccttgtccggtttctgtggctcacaaaccagcgcgcccgatatggctttcttttcacttatgaatgtaccagtacgggacaattagaacgctcctgtaacaatctctttgcaaatgtggggttacattctaaccatgtcacactgctgacgaaattcaaagtaaaaaaaaatgggaccacgtcttgagaacgatagattttctttattttacattgaacagtcgttgtctcagcgcgctttatgttttcattcatacttcatattataaaataacaaaagaagaatttcatattcacgcccaagaaatcaggctgctttccaaatgcaattgacacttcattagccatcacacaaaactctttcttgctggagcttcttttaaaaaagacctcagtacaccaaacacgttacccgacctcgttattttacgacaactatgataaaattctgaagaaaaaataaaaaaattttcatacttcttgcttttatttaaaccattgaatgatttcttttgaacaaaactacctgtttcaccaaaggaaatagaaagaaaaaatcaattagaagaaaacaaaaaacaaa

SEQ ID NO: 7 - protein, 19 aa, Saccharomyces cerevisiae
MRFPSIFTTVLFAASSALA

SEQ ID NO: 8 - protein, 556 aa, Gloeophyllum sepiarium
QSVDSYVSSEGPIAKAGVLANIGPNGSKASGASAGVVVASPSTSDPDYWYTWTRDSSLVFKSLIDQYTTGIDGTSSLRTLIDDFVTAEANLQQVSNPSGTLTTGGLGEPKFNVDETAFTGAWGRPQRDGPALRSTALITYGNWLLSNGNTSYVTSNLWPIIQNDLGYVVSYWNQSTYDLWEEVDSSSFFTTAVQHRALREGAAFATAIGQTSQVSSYTTQADNLLCFLQSYWNPSGGYITANTGGGRSGKDANTLLASIHTYDPSAGCDAATFQPCSDKALSNLKVYVDSFRSVYSINSGIASNAAVATGRYPEDSYQGGNPWYLTTFAVAEQLYDALNVWESQGSLEVTSTSLAFFQQFSSGVTAGTYSSSSSTYSTLTSAIKSFADGFVAVNAKYTPSNGGLAEQYSKSDGSPLSAVDLTWSYASALTAFEARNNTQFAGWGAAGLTVPSSCSGNSGGPTVAVTFNVNAETVWGENIYLTGSVDALENWSADNALLLSSANYPTWSITVNLPASTAIEYKYIRKNNGAVTWESDPNNSITTPASGSTTENDTWR

SEQ ID NO: 9 - protein, 374 aa, Aspergillus niger
APAPTRKGFTINQIARPANKTRTINLPGMYARSLAKFGGTVPQSVKEAASKGSAVTTPQNNDEEYLTPVTVGKSTLHLDFDTGSADLWVFSDELPSSEQTGHDLYTPSSSATKLSGYTWDISYGDGSSASGDVYRDTVTVGGVTTNKQAVEAASKISSEFVQNTANDGLLGLAFSSINTVQPKAQTTFFDTVKSQLDSPLFAVQLKHDAPGVYDFGYIDDSKYTGSITYTDADSSQGYWGFSTDGYSIGDGSSSSSGFSAIADTGTTLILLDDEIVSAYYEQVSGAQESEEAGGYVFSCSTNPPDFTVVIGDYKAVVPGKYINYAPISTGSSTCFGGIQSNSGLGLSILGDVFLKSQYVVFNSEGPKLGFAAQA

SEQ ID NO: 10 - protein, 590 aa, Trichoderma reesei
SVHLLESLEKLPHGWKAAETPSPSSQIVLQVALTQQNIDQLESRLAAVSTPTSSTYGKYLDVDEINSIFAPSDASSSAVESWLQSHGVTSYTKQGSSIWFQTNISTANAMLSTNFHTYSDLTGAKKVRTLKYSIPESLIGHVDLISPTTYFGTTKAMRKLKSSGVSPAADALAARQEPSSCKGTLVFEGETFNVFQPDCLRTEYSVDGYTPSVKSGSRIGFGSFLNESASFADQALFEKHFNIPSQNFSVVLINGGTDLPQPPSDANDGEANLDAQTILTIAHPLPITEFITAGSPPYFPDPVEPAGTPNENEPYLQYYEFLLSKSNAEIPQVITNSYGDEEQTVPRSYAVRVCNLIGLLGLRGISVLHSSGDEGVGASCVATNSTTPQFNPIFPATCPYVTSVGGTVSFNPEVAWAGSSGGFSYYFSRPWYQQEAVGTYLEKYVSAETKKYYGPYVDFSGRGFPDVAAHSVSPDYPVFQGGELTPSGGTSAASPVVAAIVALLNDARLREGKPTLGFLNPLIYLHASKGFTDITSGQSEGCNGNNTQTGSPLPGAGFIAGAHWNATKGWDPTTGFGVPNLKKLLALVRF

SEQ ID NO: 11 - protein, 511 aa, Thermoascus aurantiacus
VPVEVAGSAQGLDVTLSQVGNTRIKAVVKNTGSEDVTFVHLNFFKDAAPVQKVSLFRNATEVQFQGIKQRLITEGLSDDALTTLAPGATIEDEFDIASTSDLSEGGTITINSNGLVPITTDNKVTGYIPFTSNELSIDVDAAEAASVTQAVKILERRTRISSCSGSRQSALTTALRNAASLANKAADAAQSGSASKFSEYFKTTSSSTRQTVAARLRAVAREASSSSSGATTYYCLDPFGYCSGNVLAYTLPSYNIIANCPIFYTYLPPLTSTCHAQDQATTVLHEFTHAPGVYSPGTLDLAYGYQAAMGLSSSQAVMNADTYALYANAIYLGCTRISSCSGSRQSALTTALRNAASLANAAADAAQSGSASKFSEYFKTTSSSTRQTVAARLRAVAREASSSSSGATTYYCDDPYGYCSSNVLAYTLPSYNIIANCDIFYTYLPALTSTCHAQDQATTALHEFTHAPGVYSPGTDDLAYGYQAAMGLSSSQAVMNADTYALYANAIYLGC

SEQ ID NO: 12 - protein, 550 aa, Dichomitus squalens
KPTARNLKLHESRPSAPNGFSLVGSADSNRTLKLRLALAESNFSELERKLYDVSTPKSANYGKHLSKAEVQQLVAPGQDSIDAVNAWLKENDITAKTISSTGEWISFEVPVSKANDLFDADFSVFKHDDTGVEAIRTLSYSIPAELQGHLDLVHPTVTFPNPYSHLPVFQSPVKKTAEIQNFTAGAIPSSCSSTITPACLQAIYNIPTTAATESSNQLGVTGFIDQYANKKDLKTFLKKYRTDISSSTTFTLQTLDGGSNSQTGSKAGVEANLDIQYTVGVATGVPTTFISVGDDFQDGDLEGFLDVINALLDEDAPPSVLTTSYGQDESTISRALAVKLCNAYAQLGARGVSILFASGDGGVSGSQSASCSKFVPTFPSGCPYMTSVGATQGVNPETAADFSSGGFSNYWGVPDYQSDAVSTYLSALGKTNSGKYNASGRGFPDVSTQGVSFEVVVDGSVEAVDGTSCASPTFASIISLVNDKLVAAGKSPLGFLNPFLYSDGVAALNDITSGSNPGCNTNGFPAKKGWDPVTGLGTPDFKKLLTAVGL

SEQ ID NO: 13 - protein, 353 aa, Nocardiopsis prasina
ATGALPQSPTPEADAVSMQEALQRDLDLTSAEAEELLAAQDTAFEVDEAAAEAAGDAYGGSVFDTESLELTVLVTDAAAVEAVEATGAGTELVSYGIDGLDEIVQELNAADAVPGVVGWYPDVAGDTVVLEVLEGSGADVSGLLADAGVDASAVEVTTSDQPELYADIIGGLAYTMGGRCSVGFAATNAAGQPGFVTAGHCGRVGTQVTIGNGRGVFEQSVFPGNDAAFVRGTSNFTLTNLVSRYNTGGYATVAGHNQAPIGSSVCRSGSTTGWHCGTIQARGQSVSYPEGTVTNMTRTTVCAEPGDSGGSYISGTQAQGVTSGGSGNCRTGGTTFYQEVTPMVNSWGVRLRT

SEQ ID NO: 14 - protein, 456 aa, Penicillium simplicissimum
APASTAKDSVSSVVKNGVKYTVFEHAATGAKMEFVKNSGICETTPGVNQYSGYLSVGSNMNMWFWFFEARNNPQQAPLAAWFNGGPGCSSMIGLFQENGPCHFVNGDSTPSLNEYSWNNYANMLYVDQPIGVGFSYGTDDVTSTVTAAPYVWKLLQAFYAQFPEYESRDFAIFTESYGGHYGPEFASYIQEQNSAIKTGSISGENINLVALGVNNGWIDSTIQEKAYIDFSYNNSYQQLIDDSQRTSLLSAYNSQCLPAIQKCTKSGSNSDCQNADSVCYNKIEGPISSSGDWDVYDIREPSNDPYPPSTYSTYLSNADVVKAIGAQSSYQECPNGPYNKFASTGDNPRSFLSTLSSVVKSGINVLVWAGDADWICNWLGNYEVANAVDFSGHTEFSAKDLAPYTVNGTEKGMFKNVANFSFLKVYGAGHEVPYYQPDTALQVFEQVLQNKPIFST

SEQ ID NO: 15 - protein, 502 aa, Aspergillus niger
LQNPHRRAVPPPLSHRSVASRSVPVERRTTDFEYLTNKTARFLVNGTSIPEVDFDVGESYAGLLPNTPTGNSSLFFWFFPSQNPEASDEITIWLNGGPGCSSLDGLLQENGPFLWQPGTYKPVPNPYSWTNLTNVVYIDQPAGTGFSPGPSTVNNEEDVAAQFNSWFKHFVDTFDLHGRKVYITGESYAGMYVPYIADAMLNEEDTTYFNLKGIQINDPSINSDSVMMYSPAVRHLNHYNNIFQLNSTFLSYINAKADKCGYNAFLDKAITYPPPSPFPTAPEITEDCQVWDEVVMAAYDINPCFNYYHLIDFCPYLWDVLGFPSLASGPNNYFNRSDVQKILHVPPTDYSVCSETVIFANGDGSDPSSWGPLPSVIERTNNTIIGHGWLDYLLFLNGSLATIQNMTWNGKQGFQRPPVEPLFVPYHYGLAELYWGDEPDPYNLDAGAGYLGTAHTERGLTFSSVYLSGHEIPQYVPGAAYRQLEFLLGRISSLSAKGNYTS

SEQ ID NO: 16 - protein, 547 aa, Meriphilus giganteus
TPTGRNLKLHEAREDLPAGFSLRGAASPDTTLKLRIALVQNNFAELEDKLYDVSTPSSANYGNHLSKEEVEQYIAPAPESVKAVNAWLTENGLDAHTISPAGDWLAFEVPVSKANELFDADFSVFTHDESGLEAIRTLAYSIPAELQGHLDLVHPTVTFPNPNAHLPVVRSTQPIRNLTGRAIPASCASTITPACLQAIYGIPTTKATQSSNKLAVSGFIDQFANKADLKSFLAQFRKDISSSTTFSLQTLDGGENDQSPSEAGIEANLDIQYTVGLATGVPTTFISVGDDFQDGNLEGFLDIINFLLGESNPPQVLTTSYGQNENTISAKLANQLCNAYAQLGARGTSILFASGDGGVSGSQSAHCSNFVPTFPSGCPFMTSVGATQGVSPETAAAFSSGGFSNVFGIPSYQASAVSGYLSALGSTNSGKFNRSGRGFPDVSTQGVDFQIVSGGQTIGVDGTSCASPTFASVISLVNDRLIAAGKSPLGFLNPFLYSSAGKAALNDVTSGSNPGCSTNGFPAKAGWDPVTGLGTPNFAKLLTAVGL

SEQ ID NO: 17 - protein, 541 aa, Lecanicillium sp.
APAPHGPLVKFGEITKLPSKWIATGAADSDAVIKAQIGIKQNNIKGLQDKLADIADPNSPNYGQWLSKEEVDKYSAPAAADVAAVKAWLASSGITDVTMPTNDWIEFSVPVSKMESLLGSKYEWFVHLETGEKVPRTKQFSVPQNLHDLIDVVTPTTVLYHNMGPHAHASPQAADASGLTSPASIKSAYNVDYKGTGNTLVGTTGFLGVGASHQDYANFARQFSPGLTDFKDVSINGGSNSGDGSALEGNLDTQYCGALAAPNPSEYLAHAPEGSDGSSFNDAMLAFGNYLNANSNPPSAVSTSYGGEEDGTDPNYMDRICNEFMKAGSRGVSIFFSSGDNGVGGNGESSCYNGYYPLWPASCPYVTTVGGTEFDGSGREVVANFEQYNKNVKSPGGGFSNHFPAPSYNKNVTTAYANSLSAAQKQRLNPNGRGFPDIALVSVKYQVNVNGQISQVLGTSASSPSMAGLVGLLNDYRKTQGKPNLGFINPLLYSDKVKPALRDVTSGANKGCDSSGLPAKTGWDAASGLGSFDFAKLRTLV

SEQ ID NO: 18 - protein, 633 aa, Talaromyces proteolyticus
VPAPSKRHVVHERRDALPHSWSEPRRVDGRTQLPVRIGLTQSNIDESHDMLMDIASPSSPNYRKYMTVHEVNELFAPAGEAVSAVRDWLESAGIAAERVTQSANKQWLQFDGDAAEVESLLGAEYYIYTHDTNGRSHMGCEKYHVPEHISHHIDYIIPGVKSLEVREPQPAELEKRTFGFRKPQPPLFKALPESLETIINSILGGLLDLCSTVITPSCIKTLYNITEGTTATKGNELGIFEDLGDYYSQTDLDLFFTLFYSQIPAGTGPTLKGIDGAQAPTQTLTQAGPESDLDFQVSYPIIWPQNSILFQTDDANYEANYTFNGFLNNFLDAIDGSYCTYSAFGIDGNTADDPPYPDPASNGYKGSLQCGVYEPTNVISISYGGDEAGLSVNYQKRQCNEYKKLGLQGVSVVVSSGDSGVAGADGCLGGGKIFNPDFPAGCPYITTVGATYLPSGASSTSDSEVAVSRFPSGGGFSNIYSQPSYQSDAVNTYLTQHTPPYPAYETSDNSSVGANGGIYNKAGRGYPDVAAVGDNIVIFNAGAPTLIGGTSASAPIFASILTRINEVLLAKKGTTVGFVNPTLYANPDAFHDITSGDNPGCSTNGFSTAPGWDPVTGLGTPNYPALLKVFLGE

SEQ ID NO: 19 - protein, 371 aa, Penicillium ranomafanaense
VPTGGKKSFTVNQVAVSATKTQNFANNYARALAKYGAKVPTHVQAAAQQSGSATTTPESDDEEYLTPVNVGGTTLNLDFDTGSADLWVFSSELPASEQTGHSLYKPNNGTKLSGYTWSISYGDGSSASGDVYRDTVSVGGVKATGQAVEAASTISQQFTQDQNNDGLLGLAFSSINTVKPKSQTTFFDTVKSTLASPLFAVSLKHNAPGSYDFGFIDKSKYTGSLTYTDVDSSQGFWGFTADSYKIGSTTGSSIKGIADTGTTLLLLDDEVVSAYYKQVSGAASDSSAGGYTFDCSSTLPDFTVSISGYDAVVPGSLINYTPVSQGSSKCLGGIQSNSGLGFSIFGDIFLKSQYVVFDSNGPRLGFAAQSS

SEQ ID NO: 20 - protein, 578 aa, Aspergillus oryzae
EAFEKLSAVPKGWHYSSTPKGNTEVCLKIALAQKDAAGFEKTVLEMSDPDHPSYGQHFTTHDEMKRMLLPRDDTVDAVRQWLENGGVTDFTQDADWINFCTTVDTANKLLNAQFKWYVSDVKHIRRLRTLQYDVPESVTPHINTIQPTTRFGKISPKKAVTHSKPSQLDVTALAAAVVAKNISHCDSIITPTCLKELYNIGDYQADANSGSKIAFASYLEEYARYADLENFENYLAPWAKGQNFSVTTFNGGLNDQNSSSDSGEANLDLQYILGVSAPLPVTEFSTGGRGPLVPDLTQPDPNSNSNEPYLEFFQNVLKLDQKDLPQVISTSYGENEQEIPEKYARTVCNLIAQLGSRGVSVLFSSGDSGVGEGCMTNDGTNRTHFPPQFPAACPWVTSVGATFKTTPERGTYFSSGGFSDYWPRPEWQDEAVSSYLETIGDTFKGLYNSSGRAFPDVAAQGMNFAVYDKGTLGEFDGTSASAPAFSAVIALLNDARLRAGKPTLGFLNPWLYKTGRQGLQDITLGASIGCTGRARFGGAPDGGPVVPYASWNATQGWDPVTGLGTPDFAELKKLALGN

SEQ ID NO: 21 - protein, 456 aa, Talaromyces liani
APASTTKDNVSSVVKNGVTYTVFEHAATGAKMEFVKNSGICETTPGVNQYSGYLSVGNNMNMWFWFFEARNNPQTAPLAAWFNGGPGCSSMIGLFQENGPCHFVNGASTPSLNEYSWNNYANMLYVDQPIGVGFSYGTDDVTSTVTAAPYVWKLLQAFYAQFPEYQSRDFAIFTESYGGHYGPEFAAYIQEQNSGIAAGSVSGENINLIALGVNNGWIDPAIQEKAYIDFSYNNSYQQLIDDSQRTNLLSDYNDQCLPAIQQCAQTGRNSDCQNADNVCYDTIEGPISSSGNWDVYDIREPSNDPYPPSTYSSYLSNSRVVKAIGAQTSYQECPNGPYNKFASTGDNPRSFLSTLSSVVQSGIHVLVWAGDADWICNWLGNYRVANAVDFPGHAEFSAKALAPYTVNGTEKGMFKNVDNFSFLKVYGAGHEVPYYQPATALQVFEQILQNKSITST

SEQ ID NO: 22 - protein, 589 aa, Thermoascus thermophilus
EVFERLRAVPEGWRFSATPSDDQPIRLQIALQQHDVEGFERAVLDMSTPSSPNYGKHFQSHDEMKRMLLPSDDAVDAVLDWLQSAGITDIEEDADWINFRTTVGVANELLDTQFQWFVSETSSHVRRLRALEYSIPESVTPHIHMVQPTTRFGQIGRHHTTSREKPIVSGADIHASIAGANNQTTGTDCNTEITPKCLQDLYKFGGYKASANSGSKVGFCSYLEEYARYDDLALFEEALAPYAAGQNFSVITYNGGLNDQHSSSDSGEANLDLQYIVGVSAPLPVTEFSTGGRGELVPDLDQPNPADNSNEPYLDFLQNVLKLDQKDLPQVISTSYGENEQSVPEKYARSVCNLFMQLGSRGVSVIFSSGDSGVGSACLTNDGKNQTRFMPQFPASCPWVTSVGSTQHIAPEEATYFSSGGFSDLWPMPDYQKSAVGEYLDRLGSKWAGLYNPQGRGFPDVAAQGVNFNVYDKGSLKRFDGTSCSAPTFAGVIALLNDARLRARQPPMGFLNPWLYGAGKGGLNDIVNGGSTGCDGNARFGGAPNGSPVVPFASWNATQGWDPVSGLGTPDFSRLLKLAVPSRVGGRLA

SEQ ID NO: 23 - protein, 413 aa, Pyrococcus furiosus
AELEGLDESAAQVMATYVWNLGYDGSGITIGIIDTGIDASHPDLQGKVIGWVDFVNGRSYPYDDHGHGTHVASIAAGTGAASNGKYKGMAPGAKLAGIKVLGADGSGSISTIIKGVEWAVDNKDKYGIKVINLSLGSSQSSDGTDALSQAVNAAWDAGLVVVVAAGNSGPNKYTIGSPAAASKVITVGAVDKYDVITSFSSRGPTADGRLKPEVVAPGNWIIAARASGTSMGQPINDYYTAAPGTSMATPHVAGIAALLLQAHPSWTPDKVKTALIETADIVKPDEIADIAYGAGRVNAYKAINYDNYAKLVFTGYVANKGSQTHQFVISGASFVTATLYWDNANSDLDLYLYDPNGNQVDYSYTAYYDFEKVGYYNPTDGTWTIKVVSYSGSANYQVDVVSDGSLSQPGSSP

SEQ ID NO: 24 - protein, 387 aa, Trichoderma reesei
LPTEGQKTASVEVQYNKNYVPHGPTALFKAKRKYGAPISDNLKSLVAARQAKQALAKRQTGSAPNHPSDSADSEYITSVSIGTPAQVLPLDFDTGSSDLWVFSSETPKSSATGHAIYTPSKSSTSKKVSGASWSISYGDGSSSSGDVYTDKVTIGGFSVNTQGVESATRVSTEFVQDTVISGLVGLAFDSGNQVRPHPQKTWFSNAASSLAEPLFTADLRHGQNGSYNFGYIDTSVAKGPVAYTPVDNSQGFWEFTASGYSVGGGKLNRNSIDGIADTGTTLLLLDDNVVDAYYANVQSAQYDNQQEGVVFDCDEDLPSFSFGVGSSTITIPGDLLNLTPLEEGSSTCFGGLQSSSGIGINIFGDVALKAALVVFDLGNERLGWAQK

SEQ ID NO: 25 - protein, 408 aa, Rhizomucor miehei
RPVSKQSESKDKLLALPLTSVSRKFSQTKFGQQQLAEKLAGLKPFSEAAADGSVDTPGYYDFDLEEYAIPVSIGTPGQDFLLLFDTGSSDTWVPHKGCTKSEGCVGSRFFDPSASSTFKATNYNLNITYGTGGANGLYFEDSIAIGDITVTKQILAYVDNVRGPTAEQSPNADIFLDGLFGAAYPDNTAMEAEYGSTYNTVHVNLYKQGLISSPLFSVYMNTNSGTGEVVFGGVNNTLLGGDIAYTDVMSRYGGYYFWDAPVTGITVDGSAAVRFSRPQAFTIDTGTNFFIMPSSAASKIVKAALPDATETQQGWVVPCASYQNSKSTISIVMQKSGSSSDTIEISVPVSKMLLPVDQSNETCMFIILPDGGNQYIVGNLFLRFFVNVYDFGNNRIGFAPLASAYENE

SEQ ID NO: 26 - protein, 548 aa, Lenzites betulinus
KPMGRNLKVHEAREEIPDGFSLQGSAAPDTTLKLRIALVQSNFAELEQKLYDVSTPSSPNYGAHLSKEEVEQLVAPSADSVDAVNAWLKENDLSAQTISPAGDWLAFEVPVSKANELFDADFSVFTHDQTGLEAIRTMSYSIPAELQGHLDLVHPTVTFPNPYSHLPVVRSPIKASQNLTSRATIPASCASTITPACLQDIYGIPTTKATQSSNKLAVSGFIDQFANSADLATFLKKFRTDISSTTTFALQTLDGGSNSQSGSQAGVEANLDIQYTVGLASGVPVTFISVGDNFQDGDLEGFLDIINFLLAESAPPQVLTTSYGQNENTISVKLANQLCNAYAQLGARGTSILFASGDGGVSGSQSSSCSKFVPTFPSGCPFMTSVGATQGVNPETAADFSSGGFSNYFGIPSYQATAVKTYLTALGTTNSGKFNTSGRAFPDVSTQGVDFEIVVDGRTEGVDGTSCASPTFAAIISLVNDKLIAAGKSPLGFLNPFLYSTGASAFTDITSGSNPGCNTKGFPAKAGWDPVTGLGTPNFAKLLAAAGV

SEQ ID NO: 27 - protein, 547 aa, Neolentinus lepideus
GPAPRNLVLHESRDGVPEGFVKSSTASPDTTLKLRIALVQGDMASLEKALYDVSVPSSPLYGQHLSKQEVEEYVKPTQESVDAVNQWLSSEGITANTISPAGDWLQFSVPVSKANEMFDADFSVFTHTESGQQAIRTLSYSIPKELVGHLDLVHPTITFPNPYSHLPVVSSPAPRNLTIDASVPSSCGSTITPTCLQDLYGIPTTAATQSSNKLAVSGFIDQYANKADLKSFLTTYRKDISSSTTFTLETIDGGENPQDGSDAGVEANLDTQYTVGLATGVPTYFISVGDDYQDGDLEGFLDIVNYLLSMDQPQQVLTTSYGQNENTMSRSLANNLCNAYMQLGARGTSILFASGDGGVSGSQSGSCGSKFVPTFPSGCPYLTSVGATTGINPEVAASFSSGGFSNYWGVPSYQQSVVSSYISGLGSTNKGKYNSSGRGFPDVSAQGENVEIVVDGSTEGVDGTSCSSPIFASIVSLLNDELIAAGKSPLGFLNPFLYSDGASAFNDITSGDNPGCNTNGFSAKSGWDPVTGLGTPNYAKLRTAVGF

SEQ ID NO: 28 - protein, 399 aa, Thermococcus sp.
VSAEKVRVIITIDKDFNENSVFALGGNVVARGKVFPIVIAELSPRAVERLKNAKGVVRVEYDAEVQVLKGKSPGAGKPKPSQPAQTIPWGIERIKAPDVWSITDGSSSGVIEVAILDTGIDYDHPDLAANLAWGVSVLRGKVSTKPKDYKDQNGHGTHVAGTVAALNNDIGVVGVAPAVEIYAVRVLDASGRGSYSDIILGIEQALLGPDGVLDSDGDGIIVGDPDDDAAEVISMSLGGLSDVQAFHDAIIEAYNYGVVIVAASGNEGASSPSYPAAYPEVIAVGATDVNDQVPWWSNRGVEVSAPGVDVLSTYPDDSYETLSGTSMATPHVSGVVALIQAAYYNKYGSVLPVGTFDDNTMSTVRGILHITADDLGSSGWDADYGYGIVRADLAVQAVN

SEQ ID NO: 29 - protein, 396 aa, Thermococcus sp.
EKVRVIITIDKDFNENSVFALGGNVVARGKVFPIVIAELSPRAVERLKNAKGVVRVEYDAEVQVLKGKSPGAGKPKPSQPAQTIPWGIERIKAPDVWSITDGSSSGVIEVAILDTGIDYDHPDLAANLAWGVSVLRGKVSTKPKDYKDQNGHGTHVAGTVAALNNDIGVVGVAPAVEIYAVRVLDASGRGSYSDIILGIEQALLGPDGVLDSDGDGIIVGDPDDDAAEVISMSLGGLSDVQAFHDAIIEAYNYGVVIVAASGNEGASSPSYPAAYPEVIAVGATDVNDQVPWWSNRGVEVSAPGVDVLSTYPDDSYETLSGTSMATPHVSGVVALIQAAYYNKYGSVLPVGTFDDNTMSTVRGILHITADDLGSSGWDADYGYGIVRADLAVQAVN

SEQ ID NO: 30 - protein, 572 aa, Thermomyces lanuginosus
APFQVVERLSAPPDGWIKKEKAAPSAQIQFRLGLPQQNSEQLEQLALNIATPGHELYRKHLKRDEIKALVRPLASVSEKVLAWLRDEGVPEDRIHDDGAWIKFTVPVSTAEKLLNTEFFVFHNERTGAEQIRTLEYSVPQDIHSLVKFIQPTTHFSSLGPQVRRVVPLDVLPKLRITLEDCNKKITPDCLKQLYKIGDYVAPEDPRNRIGISGYLEQFARYADFEEFLESYAPDRTDANFTVVSINGGRNDQNSTLDSTEASLDIDYAVTLSYKTQAVYYTTAGRGPLVPDESQPDPNEVSNEPYMEQLQFLLDLPDEELPTVLTTSYGENEQSLPGSYADETCNMFRLLGMRGVSVIFSSGDWGTGIVCKANDGSERIKFDPVYPASCPYVTSVGGTTGVNPERAVEFSSGGFSDRFPRPKYQDEAVRSYLTKLGDHWKGLYNESGRAFPDVAAQADNFVVRDQGQWVSVGGTSASAPVFAAIIANVNAELLKAGKPPLGFLNPWLYGLKGRGFTDVVHGGSTGCPGTVPWTGLPAGHVPYASWNATEGWDPVTGLGTPLYDELVKAALGK

SEQ ID NO: 31 - protein, 397 aa, Thermococcus thioreducens
EKPELVRVIVHVDRGHFNTADVATIGGHVVYQFKLIDAVVVEVPSTAVGRLKKLPGVKMVEFDHKARILAGPPSWLGGGQPSQQIPWGISRVRAPDVWGITDGSGGVIEVAVLDTGVDYDHPDLAGNIAWCVSTLRGRVTTNPAQCKDQNGHGTHVIGTIAALNNDIGVVGVAPGVEIYSIRVLDASGSGSYSDIAIGIEQALLGPDGILDKDGDGIIVGDPDDDAAEVISMSLGGPTDDQYLHDMIITAYNYGVVIVAASGNEGASSPSYPAAYPEVIAVGASDVNDQIASWSNRQPEVSAPGVDILSTYPDDTYETLSGTSMATPHVSGVVALIQAAYYNKYGKVLPVGTFDDMGTNTVRGILHVTADDLGDAGWDIYYGYGIVRADLAVQAAIG

SEQ ID NO: 32 - protein, 549 aa, Polyporus arcularius
KPMARSMKLHESREGIPEGFSLRGAAQPEQTIKLRLALVQSNFAELERKLMDVSTPSSANYGKHLSKAEVQQLVAPTQDSVDAVKSWLKENDISAKTISATGDWLSFEVPVSKANELFDADFSIYTHDETGTEAVRTLSYSIPAELQGHLDLVHPTVTFPNPRGLPPVFTAPIKAEAQNLTSRATIPSSCARTITPACLQAIYNIPSTPATESSNKLAVTGFIEQFANKADLKTFLTRFRTDISSSTSFTLQTLDGGSNPQSSSEAGVEANLDIQYTVGVATGVPTVFISVGEDFQDGDLEGFLDVVNSLLDEDTPPFVMTTSYGQNENTISRNLANNLCNAYAQLGARGVSILFASGDGGVAGSQSASCSKFVPTFPSGCPFMTSVGATQGFSPETAADFSSGGFSNYFAIPDYQTSAVSGYIKALGNTNSGKYNATGRGFPDIATQGVNFEVVVGGQSGTVEGTSCSSPTLASIISLLNDRLIAAGKSPLGFLNPFLYSTGTSALNDITSGSNPGCNTNGFPAKAGWDPVTGLGTPDFNKLLSAVGL

SEQ ID NO: 33 - protein, 548 aa, Ganoderma lucidum
KSTTRNLKLHETRQGAPSGFSHTGSADPNQTLKLRLALVQGNTAELERKLYDVSTPSSANYGKHLSKEEVRQLVAPAQGSVDAVNAWLRENGITAKSTSAAGDWLSFEVPVSKANELFDADFSVFKHDDTGVKAVRTLSYSIPAELQGHLDLVHPTVTFPNPNGHMPVFQAPVKDTDAVQNFSARAVPSSCSNTITPACLQALYNIPSDAATQSSNKLAVTGFIEQYANQVDLAVFLKQYRADISSNTTFALQTLDGGSNSQTNVPGVEANLDIQYTVGIATGVPTVFISVGDQYQDGDLEGFLDVINFLLDEDTPPYVVTTSYGQDEHTISRKLAQNLCNAYAQLGARGVSILFASGDGGVAGSRSNSCSKFVPTFPSGCPYMTSVGATQGVPETAADFSSGGFSNYFGTPDYQASAVKSYLSTLGSTNRGKFNASGRGFPDVATQGVNFEVIVDGEVEGVSGTSAASPMFAAIVALLNDKLIAAGKSPLGFLNPFLYSKGVEALNDITTGSNPGCGTIGFPAKEGWDPVTGLGTPDFQKLASAAGL

SEQ ID NO: 34 - protein, 548 aa, Ganoderma lucidum
KTATRNLKLHETSQGAPSGFSLTGSADPDQTLKLRLALVQGNVAELERRLYDVSTPSSPNYGKHLSKSEVQQLVAPAQDSIDAINAWLKENGISAKTTSATGDWLSFEVPVSKANELFDADFSVYKHHDTGMEVVRTLSYSIPAELQAHLDLVHPTVTFPNPKGHPPVFQAPAMITNDVQNFSAGAVPSSCSSRITPACLQALYNIPSDPATQPSNKLAVTGYIEQYANQDDLAVFLKEYRADMSSNTTFTLQTLDGGVNSQTDEAGIEANLDVQYTVGIATGVPTVFISVGDQYQDGNLEGFLDVVNFLLDEDTPPYVMTTSYGQDEHTMSRKLAQNLCNAYAQLGARGVSILFASGDGGVAGSRSSSCSKFVPTFPSGCPYMTSVGATQGVPETAADFSSGGFSNYFGIPDYQASAVSGYLSALGHTNKGKYNASGRGFPDVSTQGVNFEVMVDGALEGVSGTSAASPTFAAVVALLNDRLIAAGKSPLGFLNPFLYSKGVSALNDITSGSNPGCRTNGFPAKEGWDPVTGLGTPDFQKLASAAGL

SEQ ID NO: 35 - protein, 541 aa, Ganoderma lucidum
KPTARNLRLHETRQGAPSGFSLTGSADPNQTVRLRLALVQGNTGELERKLYDVSTPSSANYGKHLSKAEVQQLVAPAQGSIDAVNAWLKENDITAKTISATGDWLSFEVPVNKANELFDADFSVFKHDDTGMEAVRTLSYSIPAELQGHLDLVHPTVTFPNPKGNLPLFQTPIKSKRDVPADCSNNITPACLQALYNIPSDAATQSSNTLAVTGYIEQYANQQDLTSFLGQFRPDISSNTTFALQTIDGGSNSQNGSDAGGEANLDIQYTVGLATGVPTVFISVGEQYQDGDLGGLLDVINFVLAEDAPPNVITTSYGQNENTISLKLAQNLCNAYAQLGARGVSILFASGDGGVAGSQSDNCTQFVPTFPSGCPYMTSVGATQGVPETAADFSTGGFSNLFSVPDYQAAAVQSYLSALGGTYQGLFNASGRAFPDVSTQGVNFETVVDGSVSGASGTSAASPTFAAIVALLNDRLVAAGKSPLGFLNPFLYSTGASALNDIATGSNPGCGTNGFSAQKGWDPVTGLGTPDFQKLAAAAGL

SEQ ID NO: 36 - protein, 547 aa, Trametes sp.
TPTGRNLKLHEAREDIPTGYSLRGAASPDTTLKLRLALVQNNFAELEDKLYDVSTPSSANYGNHLSKEEVEQYIAPAPESVKAVNAWLTENGLDAHTISPAGDWLAFEVPVSKANELFDADFSVFTHDESGLEAIRTLAYSIPAELQGHLDLVHPTVTFPNPNAHLPVVRSTKPIQNLTGRAIPASCASTITPACLQAIYGIPTTKATQSSNKLAVSGFIDQFANSADLKSFLSTFRKDISSSTTFALQTLDGGQNNQSPSQAGIEANLDIQYTVGLATGVPVTFISVGDNFQDGDLEGFLDIINFLLSESNPPQVLTTSYGQNENTISAKLANQLCNAYAQLGARGTSILFASGDGGVAGSQSSSCRNFVPTFPSGCPFMTSVGATQGVSPETAADFSSGGFSNVFGIPSYQTSAVSGYLSALGNTNSGKFNRSGRGFPDVATQGVNFQIVSGGDTGGVDGTSCASPTFASVISLINDRLIAAGKSPLGFLNPFLYSAAGKAALNDVTSGSNPGCNTNGFPAKAGWDPVTGLGTPNFAKLLTAVGL

SEQ ID NO: 37 - protein, 553 aa, Cinereomyces lindbladii
KPTARNLLVHESLDGVPTGFQLVGPASPDTVLSMRIALVQSDPAGLEAALYDVSTPSSASYGNHLSKAEVEKFVSPTSESVQAVNAWLTENDLTATQLSPAGDWLGFEVPVSKAEDLFGTQFSVFTHEATGMQTVRTLSYSIPSELQGHLDLVFPTINFPDPNANLPVFRHASKKREVTTLNANLTSDAVPSSCADTITPACLQALYGIPTTPATSSTNQLGVSGFIDQFANQADLKTFLQNFRTDISSSTTFSLETLDGGSNSQNRGDAGVEANLDTQYTVGLATDVPTVFISVGEDNQDGSLGGFLDIINFLLDQDSPPQVLTTSYGQNENTVSRAVANNLCNAYAQLGARGTSILFASGDGGVSGSQSASCRTFVPTFPSGCPFMTSVGATTGINPETAATFSAGGFSNYFGTPSYQASAVSSYLAALGSTNSGKFNTSGRGYPDVSTQGENFEIVVSGEEEGVDGTSCASPTFASIISLVNDRLIAAGKPPLGFLNPFLYSTGASAFTDITTGDNPGCNTNGFPAKSGWDPVTGLGTPNFSKLLTAVGL

SEQ ID NO: 38 - protein, 559 aa, Trametes versicolor
AVASTLQLHEARKGIPAGFSLHGAASPDTVLNLRMALVQSNFAGLEERLYDVSTPSSANYGKHLSKAEVEQYVAPRQQSITAVKAWLAANGLSGTSISPAGDWIAAKVPVSKANKLLGAQFSVFNNDATGRQIIRTLAYSIPAELKGHLDLVHPTITFADIKPLVPVVSARRESRVLVDSDLVANTIPASCNAAITPACLQDLYGIPSTPATQSSNQLGVSGFIDQFANQADLATFLTEFRPDVSNSTTFTLQTLDGGQNPQDPSDAGVEANLDTQYTVGVATNVPTTFFSVGDDTKDGIFGFLDLISFLLAAAAPPQVLTTSYGADEGGLSANLVRNLCQAYAQLGARGTSILFSSGDGGVSGSQAEGCVDFVPTFPSGCPFLTSVGATQLTTASGLTVETAAGFSSGGFSNYFPTPPYQQAVVDAYIKKTLVNGTVNEGLFNASGRAFPDVSAVGVDYLIVVGGGTDIVSGTSASSPLFASVIALINDRRLAAGKPPLGFLNPFLYSQAGASALNDVTVGSNPGCASPGFPAAQGWDPVTGLGTPNFAKLLAAALAL

SEQ ID NO: 39 - protein, 541 aa, Paecilomyces hepialid
APAPHGPLVKFGEIRKLPSKWVATGAADANAVIKGQIGIKQNNIQGLQAKLADIADPNSPNYGQWLSKEEVDKYSAPAAADVAAVKAWLASSGITDVTMPTNDWIEFSVPVSKMESLLGSKYEWFVHLETGEKVPRTKEFSVPQNLHDLIDVVTPTTVLYHNINPHTHSSPQAAGAAGLTSPASIKSAYNVDYKGTGNTLVGTTGFLGVGASHTDYANFGQQFSPGLKDFQDVSVNGGSNSGDGSALEGNLDTQYCGALAAPNPSEYLAHAPEGSDNNSFNDAMLAFGNYLNSARNPPSAVSTSYGGEEDGVDASYLDRICNEFMKAGSRGVSIFFSSGDNGVGGNGESSCQNGYYPLWPATCPYVTTVGGTEFDNSGREVVANFEQYNKNIKSPGGGYSNHFAAPSYNKAVTTSYANGLAAPQKQRLNPNGRGYPDISLVSVKYQVNVNNQISQVLGTSASSPSIAGLVGLLNDYRKTQGKPNLGFINPLLYSDKVKPALRDVTSGSNKGCDSVGLPAKTGWDAASGLGSFDFGKLRTLV

SEQ ID NO: 40 - protein, 541 aa, Isaria tenuipes
APAPHGPLVKFGELKKLPSQWVATGAANGDAVIKAQIGIKQNNIKGLQDKLAEISDPNSPSYGQWLSKEEVAKYTAPADADVAAVKAWLSSAGITEVTMPTNDWLEFSVPVSKMESLLGSKYEWFVHLETGEKAPRTKEFSVPQNLHGIIDVVTPTTVLYHNINPNSHGNELSASASGLTSPASIKSAYNVDYKGTGNTLVATTGFLGVGASHNDYLAFGHQFSPGLKDFQDVSVNGGSNSGDGSALEGNLDTQYCGALASPNPSQYLANSPEGSDNNSFNDAMTAFGNYLNSASNPPSAVSTSYGGEEDGVDAGYLDRICNEFMKAGSRGISVFFSSGDNGVGGNGEPSCQNGYYPLWPATCPYVTTVGGTEFDDSGREVVANFEQYNKNVKSPGGGYSNHFPAPDYNKNVTTAYANSLSAAQQQRLNPNGRGFPDISLVSVKYQVSLNGQTKQVLGTSASSPSVAGLVGLLNDYRKTQGKSNLGFLNPLLYSGKVNAALRDVTSGSNKGCDSVGLPAKSGWDAASGLGSFDFAKLRSLI

SEQ ID NO: 41 - protein, 578 aa, Aspergillus tamarii
EAFEKLSAVPKGWHYSSTPEGSTSVCLKIALAQKDAAGFEKRVYEMSDPDHPNYGQHFTTHEEMKRMLLPRDDTVDAVRQWLENGGVTDVRQDSDWINFCTTVDTANKLLNAQFKWYVSDVKHIRRLRTLQYDVPGSVASHVNTIQPTTRFGKITPKKAVTHSKPSQLDVTALAAAVVAKNISHCDSIITPTCLKELYNIGDYQADANSGSKIAFASYLEEYARYADLENFENYLAPWAKGQNFSVITYNGGLNDQNSSSDSGEANLDLQYILGVSAPLPVTEFSTGGRGPLVPDLTQPDPNANSNEPYLEFFQNVLKLDQEQLPQVISTSYGENEQEIPEKYARTVCNLIAQLGSRGVSVLFSSGDSGVGEGCMTNDGTNRTHFPPQFPAACPWVTSVGATYKTTPERATYFSSGGFSDYWARPEWQEEAVSSYLETIGDAFKGLYNASGRAFPDVAAQGMNFAVYDKGTLGEFDGTSASAPAFSAIIALLNDARLRAGKPTLGFLNPWLYKTGRQGLQDITLGASTGCTGRARFGGAPDGGPVVPFASWNATQGWDPVTGLGTPDFAELKKLALAN

SEQ ID NO: 42 - protein, 587 aa, Aspergillus brasiliensis
EIFEKLSGVPNGWRYANNPQGNEVIRLQIALQQHDVTGFEQAVMDMSTPGHADYGKHFRTHEEMKRMLLPSDTAVDSVRDWLESAGVHNIQVDADWIKFHTTVTKANALLDADFKWYVSEARHIRRLRTLQYSIPDALVSHINMIQPTTRFGQIQPNRATMRSKPKHADETFLTAATLAQNTSHCDSIITPSCLKQLYNIGDYQADPKSGSKIGFASYLEEYARYADLEKFEQHLAPNAIGQNFTVVQFNGGLNDQLSTKDSGEANLDLQYILGVSAPLPVTEYSTGGRGELVPDLSSPDPNDNSNEPYLDFLQNILKLNNSDLPQVISTSYGEDEQTIPVPYARAVCNLYAQLGSRGVSVIFSSGDSGVGAACLTNDGTNRTHFPPQFPASCPWVTSVGATSKTSPEQAVSFSSGGFSDLWPRPSYQHAAVQTYLTEHLGNKFSGLFNASGRAFPDVSAQGVNYAVYDKGILGQFDGTSCSAPTFSGVIALLNDARLRAGLPVMGFLNPFLYGAGSKLGGLNDIVTGGSVGCDGRNRFGGTPNGSPVVPFASWNATTGWDPVSGLGTPDFAKLKVVALGESEGDEN

SEQ ID NO: 43 - protein, 582 aa, Aspergillus iizukae
EVFDTLAAVPKGWHYSHTPRADQPISLKIALKQHNVEGFEQAVLDMSTPGHEHYGKHFREHDEMKRMLLPSDATVDAVKDWLLAADVTDYEVDADWINLHTTVQQANELLDTEFAWYVSDVRAVRRLRTLRYSVPDAVAPHINMVQPTTRFGQIHPDRATFRAGSTHFGAHILSAMSAVGDVSSANVTCDDVITPLCLKELYKVDGYRAEAEHGSKIAFASYLEEYARYDDMVRFQEKLAPYAKGENFSVILYNGGVDDQQSTSDSGEANLDLQTIMGLSAPLPITEYITGGRGKLIPDLSQPDPNDNSNEPYLEWIQNVLKHSPEELPQVISTSYGEDEQTIPRGYAESVCNLLAQLGSRGVSVIFSSGDSGVGSACQTNDGTNTTHFPPQFPASCPWVTSVGATSKTHPEEAVYFSSGGFSDLWARPAWQDDAVSTYIESIGGKFAGLYNASGRAFPDVSAQGQNYAIFDKGRLGKMDGTSCSAPAFAGIVSLLNDARLRANRPVLGFLNPWLYGTAREGLNDIVHGGSKGCDGRDRFGGKPNGSPVVPYASWNATPGWDPVSGLGTPNFATLVQVALHD

SEQ ID NO: 44 - protein, 456 aa, Penicillium sp.
APASTAKDSVSSVVKNGVKYTVFEHAATGAKMEFVKNSGICETTPGVNQYSGYLSVGSNMNMWFWFFEARNNPQQAPLAAWFNGGPGCSSMIGLFQENGPCHFVNGDSTPSLNEYSWNNYANMLYVDQPIGVGFSYGTDDVTSTVTAAPYVWKLLQAFYAQFPEYESRDFAIFTESYGGHYGPEFASYIQDQNAAIKAGSVSGENINLVALGVNNGWIDSTIQEKAYIDFSYNNSYKQLIDDSQRTSLLSAYNDQCLPAIQKCTSSGSNSDCKNADSVCYNQIEGPISSSGDWDVYDIREPSNDPYPPSTYSTYLSNADVVKAIGAQSSYQECPNGPYNKFTSTGDNPRSFLSTLSSVVKSGINVLVWAGDADWICNWLGNYEVANAVDFSGHTDFSAKDLAPYTVNGTEKGLFKNVDNFSFLRVYGAGHEVPYYQPDTALQVFEQILQKKPIFST

SEQ ID NO: 45 - protein, 456 aa, Aspergillus denticulatus
STASAAKDSVSSIVKNGVKYTVFEHAATGAKMEFVKNSGICETTPGVNQYSGYLSVGDNMNMWFWFFEARNNPQQAPLAAWFNGGPGCSSMIGLFQEHGPCHFVNGEDTPSLNEYSWNNYANMLYVDQPIGVGFSYGTDDVTSTVTAAPYVWKLLQAFYAQFPEYESRDFAVFTESYGGHYGPEFASYIQQQNAAIKAGTVSGENINLIALGVNNGWIDSAIQEKAYIDFSYNNTYKQLISSSDRTRLLSVYNSQCLPAIQKCTSTGTTAACRNADSVCYNNIEGPISSSGDWDVYDIREPANDPYPPATYSTYLADPDVVKAIGAQTSYQECPNGPYNKFASTGDNPRSFLSTLSNVVKSGINVLVWAGDADWICNWLGNYEVANAVDYPGQSEFEAKDLAPYTVNGAEKGMFKNVDNFSFLRVYGAGHEVPYYQPETALQVFQQTLQKKPIFST

SEQ ID NO: 46 - protein, 456 aa, Hamigera sp.
APASTAKDTLSSIVKNGVTYNVFEHADSGAKIEFVKNSGICETTPGVNQYSGYLSVGDNMNMWFWFFEARNNPQKAPLAAWFNGGPGCSSMIGLFQENGPCHFVNGENTPSLNEYSWNNYANMLYVDQPIGVGFSYGTDDVDSTVTAAPYVWKLLQAFYAQFPEYESRDFAIFTESYGGHYGPEFAHYIQQQNAAIKSGSVKGENINLIGLGVNNGWIDSAIQEKAYIDFSYNNSYKQLIDFSQRTSLMRAYKNQCLPAIQKCYQTGTNADCTDASSVCYNNIEGPISSSGDWDVYDIREPSNDPYPPKTYSSYLSDPKVVKAIGARTNYKECPNGPYNKFSTTGDNPRSFLSTLSDVVKSGINVILWAGDADWICNWLGGYGVANAVDYPGHAQFRAKALAPYTVNGTEKGQFKTVDNFQFLKVYGAGHEVPYYQPETALQVFEQILQKKPIHST

SEQ ID NO: 47 - protein, 456 aa, Penicillium janthinellum
APASTAKDTVSSVVKDGVTYTVFEHAATGAKMEFVKNSGICETTPGVNQYSGYLSVGSNMNMWFWFFEARNNPQQAPLAAWFNGGPGCSSMIGLFQENGPCHFVNGESTPSLNENSWNNYANMIYIDQPIGVGFSYGTDRVTSTVTAAPYVWKLLQAFYAQFPEYESRDFAIFTESYGGHYGPEFASYIEQQNAAIKAGSVTGQNVNIVALGVNNGWIDATIQEKAYIDFSYNNSYQQIIDSSTRDSLLDAYNNQCLPALQQCAQSGSNSDCTNADSVCYQNIEGPISSSGDFDVYDIREPSNDPYPPKTYSTYLSDPTVVKAIGARTNYQECPNGPYNKFASTGDNPRSFLSTLSSVVQSGINVLVWAGDADWICNWLGNYAVANAVDFPGNAQFSAMDLAPYTVNGVEKGQFKTVDNFSFLKVYGAGHEVPYYQPDTALQVFKQILQKKPISST

SEQ ID NO: 48 - protein, 456 aa, Penicillium vasconiae
APASTAKDSVSSVVKNGVKYTVFEHAATGAKMEFVKNSGICETTPGVNQYSGYLSVGSNMNMWFWFFEARNNPQQAPLAAWFNGGPGCSSMIGLFQENGPCHFVNGDSTPSLNEYSWNNYANMLYVDQPIGVGFSYGTDDVTSTVTAAPYVWKLLQAFYAQFPEYESRDFAIFTESYGGHYGPEFASYIQEQNAAITAGSVSGQKINLIALGVNNGWIDSTIQEKAYIDFSYNNSYQQLIDDSQRTSLLSAYNKQCLPAIQKCTQTGSNSACQNAANVCYNNIEGPISSSGDWDVYDIREPSNDPYPPSTYSTYLANSDVVKAIGAQSSYQECPNGPYNKFASTGDNPRSFLSTLSSVVKSGINVLVWAGDADWICNWLGNYEVANAVDFSGHAEFSAKDLAPYTVNGAEKGMFKNVDNFSFLKVYGAGHEVPYYQPETALQVFEQILQKKPISST

SEQ ID NO: 49 - protein, 454 aa, Hamigera paravellanea
APSLRDKRSFVERDGVTYTVFEHAATGAKMEFVQNSGICETTPGVNQYSGYLSVGDNMNMWFWFFEARNNPTAAPLAAWFNGGPGCSSMIGLFQENGPCHFVNGESTPSLNEYSFNNYANVLYVDQPIGTGFSYGTDDVTSTVTAAPYVWKLLQAFYAQFPEYESRDFGIFTESYGGHYGPEFASYIQEQNAAIKAGSVSGDNINLVALGINNGWFDAGIQEKAYIDFSYNNSYRQIISSSQRSSYLDAYNHDCLPAIESCASSGTNSACKNAESVCYNGIEGPISSAADFDVYDVRQPSNDPYPPATYSTYLQSASVRKAIGARTKYQECPNGPYNKFETTGDNSRSFLSTLSDVVNTGITVLVWAGDADWICNWVGGHAVADAVTFARQKTFQAKPLEPYTVNGTEKGRFKTVDNFTFLRVYEAGHEVPYYQPETALQVFVQTMQKKAIFST

SEQ ID NO: 50 - protein, 453 aa, Talaromyces variabilis
AAVPQDKRSIVKRDGVTYNVFEHAATGAKMEFVKNSGICETTPGVNQYSGYLSVGDNMNMWFWFFESRNNASGAPLAAWFNGGPGCSSMIGLFQENGPCHFVNGEKKPSLNKYSFNEYANVLYVDQPIGVGFSYGTDDVTSTESAAPYVWKLLQAFYAQFPQYESRDFGIFTESYGGHYGPEFAHYLQQQNEGVKNGSVDGENINLVALGINNGWFDTQLQEGAYIDYAYSNNYKKIIDSSQRSSLEDSLKSDCLPAVKQCLSSGSDSDCENASDTCGQIESSIQQAADFDVYDVREPSNDPYPPSTYSDYLADSSVVKAIGAKSTYKECPNGPYYKFSSTGDNTRSFLSELSSVVQSGIQVLVWAGDADWICNYMGVQRVADAVEFDGSSQFSNATLKPYTVNGTKKGEYKNVDNFSYLRVYGAGHEVPYYQPAVALQVFKQTMQQQAIKST

SEQ ID NO: 51 - protein, 456 aa, Penicillium arenicola
APATHLQDKRSIVERDGVNYTVFEHAATGAKLEFVTNSGICETTSGVNQYSGYLSVGTNMNMWFWFFESRNSPSTAPLAAWFNGGPGCSSMIGLFQENGPCQFYDGASTPSLNPYSFNEYANMIYIDQPIGVGFSYGTDDVTSTVTAAPYVWKLIQAFYASFPAYESREFGLFTESYGGHYGPEFAYYIQQQNAAIASGTVTGDTIDIVALGINNGWIDSALQEKAYIEYSYNNSYKQIITSSQRTSYLSTYTNDCLPAINKCTTGGSNSACSNAADVCYNDIESPIMSDADFDVYDIRQPSNDAYPPETYVTYLQTSSVVKAIGASSTYQECPDAPYNKFATTGDNDRSFLATLSTVVQSGITVLLWAGDADWICNWVGNQYVADAVTWSGQSSFAAQTLTPYTVNGSEVGTFKTLDNLSFLRVYEAGHEVPYYQPATALQAFIQTMQKKALSST

SEQ ID NO: 52 - protein, 354 aa, Nocardiopsis kunsanensis
APAPQNPTEPAEATTMAEALERDLGLNEAEATDLIDAQESALDVDAEATEAAGEHYGGSLFDTETHDLTVLVTDSAAVPGVEAAGAEAAVVEHGVEGLDDLISDLDSAGAQEGVVGWYPEVENDTVVIETLEGADADVDALLSSAGVDPADVRVETTDEAPEVYANIVGGDAYTIGGSSRCSVGFPASDSYGQPGFVTAGHCGTTGSSVSIGNGSGVFSQSVFPGNDAAFVRGTSNFSLTNLVNRYNSGSDVAVSGSTQAPIGSQVCRSGSTTGWHCGTIQARGQTVSYPQGTVRDLTRTSVCAEPGDSGGSFISGSQAQGVTSGGSGNCSWGGTTYYQEVNPMLNSWNLNLST

SEQ ID NO: 53 - protein, 425 aa, Streptomyces parvulus
GTAPSPAAPTAAESLRADAAPPALLRAMERDLGLGREQAERRLGNEAEAGAVAGRLRADLGGDFAGAWVRGAESGTLTVATTDAADVPAIEARGAVAEVVRHSLADLGAAKSRLDRAAAHRDTAEAPVRYVDVRTNTVTVQAVRPSAARALLAAAGVDAGLARVETSAERPRPLYDLRGGEAYYINNSGRCSVGFPVTKGTQQGFATAGHCGRAGASTSGANRVAQGTFQGSVFPGRDMAWVAANSQWTATPYVSGAGGQNVQVAGSTQAPVGASVCRSGSTTGWHCGTIQQHDTSVTYPEGTITGVTRTTVCAEPGDSGGSYISGSQAQGVTSGGSGNCGSGGTTFFQPINPLLQNYGLTLKTTGGGGEDPGEPGEPGGTWAAGTVYRPGDTVTYGGATYRCLQGHQAQRGWEPANVPALWQRV

SEQ ID NO: 54 - protein, 350 aa, Saccharopolyspora endophytica
LTATIADPAGPPVSPELVTAMQRDLGLTADQAVARLGQEAVAARADSALRDALAGSYGGSYFDANLGKLVVGTTDAAKSDEVRAAGAEPRQVDASERQLDGIVEALNGRGAQVPAAVTGWYADVRENAVVVTTQPGTAEQATGFVRDAQVPQESVRVWESPAQPETYADVVGGYAYYTASGARCSMGFAVQGGFVTAGHCGAPGESTTQPTGYFAGSSFPGNDYAFVNTGTDDTGYPLVYNYSSGYVRVSGSAEAPLGSSICRSGSTTGWHCGTVLAKNQSVRYQEGTVSGLTRTNVCAEPGDSGGSFISGNQAQGMTSGGWGDCRTGGETYYQPVREALSAYGLTLLTQ

SEQ ID NO: 55 - protein, 355 aa, Luteus cellwall
ASGPLPQSPSPDSDVATTMAEALERDLNLTSTEAQELLTAQEAAFEADEAAAQAAGDAYGGSVFDTETLDLTVMVTDAAAVQAVEATGAKADVVSYGIDGLDTIIDDLNEADAPEGVVGWYPDIDSDTVVLEVLEGSGADVDALLAEAGVDASAVKVESTTEQPELYADIIGGLAYYMGGRCSVGFAATNASGQPGFVTAGHCGRVGTQVTIGNGRGVFERSVFPGNDAAFVRGTSNFTLTNLVSRYNSGGYATVSGSSVAPIGSSVCRSGSTTGWRCGTIQARGQTVTYPQGTIYNMTRTSACAEPGDSGGSFISGTQAQGVTSGGSGNCSWGGTTFYQEVNPMLNSWNLRLRT

SEQ ID NO: 56 - protein, 406 aa, Saccharothrix australiensis
GPPTTHQEESGLIAAMARDFKITPDQARARLVREAKAATTEQSLKSRLGGHYAGAWLNEGATELVVAVTDAAQAKVVEDAGATPKVVQRSQIQLDELKAKLDANKNAPKDVPAWYVDVKTNSVVVLARNTASAKAFARASGLSEADVRIEQSTEDPRPLIDVIGGNAYYMGSGGRCSVGFSVNGGFVTAGHCGRVGTTTTQPSGTFAGSTFPGRDYAWVRVSSGNTMRGLVNRYPGTVPVKGSNESSVGASVCRSGSTTGWHCGTIQQKNTSVTYPEGTISGVTRTNACAEPGDSGGSWLTGDQAQGVTSGGSGNCSSGGTTYFQPVNPILQAYGLQLVIEGGPTGTTGPTTTSSNPGGTTWQPGVAYTAGTTVTYEGVGYECLQGHTSQIGWEPSAVPALWERVG

SEQ ID NO: 57 - protein, 346 aa, Nocardiopsis baichengensis
DAFPEGTEPLAEAIERDLGVASGQADELLTAEESARSLEKEAEKAAGEAFAGAVFDTETHELTVSVADPSAVEAVEATGAETRVVEASQDELDAAMADLDAASEDGVSEEVTGWHVDLESNTVVVEALEGSEDAAEDLIADAGLDSAPVVVEKADAQPETFGAIVGGDAYYPGNSRCSIGFSVRGGFVTAGHCGSTGTSVSGSAGESGRVAGSVFPGRDMGYVRANSGWTPSPYVNNYRGGRVAVRGSNEASVGASVCRSGSTTGWHCGTIQAKNQTVNYPQGTVRGLTRTTACAEPGDSGGSWLSGNQAQGVTSGGSGNCSWGGTTFFQPVNPILSQWGLSLTTT

SEQ ID NO: 58 - protein, 353 aa, Streptomyces sp.
NDTLTERADAAVAELPAGVLDAMERDLGLSEQEAGLQLVAQYDASLLGETLSADLDAYAGSWLADGTDLVVATTDRAEAAQITEAGAKVEIVDHTLTELESVKAALDEAAESYDTTDAPVWYVDITTNDVVLLTSDTAEAKGFVEAAGVDAGAVSIQTSDEQPQAFYDLVGGDAYYMGGGRCSVGFSVTQGSTPGFATAGHCGTVGTSTTGFNQAAQGTFEESSFPGDDMAWVSVNSNWNTTPTVNDGAVTVSGSTQGAVGASICRSGSTTGWHCGTIEQHNTSVTYPEGTITGVTRTSVCAEPGDSGGSYISGSQAQGVTSGGSGNCTSGGTTYHQPINPLLSAYGLDLVTG

SEQ ID NO: 59 - protein, 353 aa, Actinoalloteichus spitiensis
DTPSPDGADATVASPEMLSAMQRDLGLTEQEALTRVAVEATAVETEDELRASLGPAFGGAHFDGDTNTLVVGVTSAAKADEVRAAGATPEVVAFSADTLDGVVSTLNETSEVPDGVTGWYVDTADNTVVVTTALGSGEAAADFVAESGVNADAVTVVESTEQPRTLYDIIGGDAYYFGGSRCSVGFSVSVGYVTAGHCGGVGTATQGYNRVSSGQVAGSVFPGSDMGYVRTNANWTPRPLVNRYSGGATVTVSGSNEAAVGASICRSGSTTGWRCGTVQAKNQTVFYAQGAVSGLTRTNACAEGGDSGGSWLSGSQAQGVTSGGSGNCTWGGTTYFQPLNPILSRWGLSLTRG

SEQ ID NO: 60 - protein, 338 aa, Byssochlamys verrucosa
FPAAVDVKRAPSSLGITLSQVSNTLIKAVVQNTGRGEVSFIHLNFFKDDAPVKKVAVYRNGSEVQFEGIQRRYKSTGLTRDAFTTLAPGKTAEDVFDIASTCDLISGGPVTIRSEGVVPYATANGIDIAGYIPYSSNELTIDVDGAIASTVSKAIAPLNRRTNISSCSGSEQSTLTMALKNAASLAHAAADAAESGSASKFSEYFKTTASSTRKTVAARLRAVAQEASSSSSGSTTYYCNDAYGYCTTNVLAYTLPSHNTIATCDLYYTNLSALTRTCHAQDQATTSLHEFTHAPGVYSPGTDDLAYGYASSTSLSSSQAVMNADSYALYANAIYVGC

SEQ ID NO: 61 - protein, 339 aa, Hamigera terricola
SPVNVNVGREELPALDVTLSQIGNTQIKAVVKNTGSEDVTFMHLNFFTDSAPVKKVSVFQNNTEVEFQGILRRVKYTDVSTDSVTTLAPGASIEDVFDIATTTDLASGGAVTVKTDGFVPILASAENKVTGYARYTSNELHLDVDGPSAATVSKAIAPLDRRTRLSSCSGSRSSALQTALRNTVSLANAAANAARSGSASKFSEYFKTTSSSVRSTVAARLSAVASEASSTSSGSTTYYCNDPYGYCSTDVLAYTLPSYNIIANCDIYYSYLPALTGSCHAQDQATTTLHEFTHAPGVYSPGTEDYGYGYNAATSLSSSQAVLNADSYALYANAIYLGC

SEQ ID NO: 62 - protein, 334 aa, Aspergillus tamarii
IPVEVPASAPGLDVTLSQVGNTRIKAVVKNTGSEEVTFVHLNFFKDAAPVQKVSLFRNATEVQFQGIKQRLITEGLSDEALTTLAPGATIEDEFDIASTSDLSEGGTITINSNGLVPITTENKVTGYIPFASNELSIDVDAAEAATVSQAVKILDRRTKVTSCSGSRSSALQTALRNTVSLARAAASAAQSGSSSRFQEYFKTTSSSTRSTVAARLNAVANEAASTASGSTTYYCSDVYGYCSSNVLAYTLPAYNIIANCDLYYSYLPALTSTCHAQDQATTTLHEFTHAPGVYSPGTDDLGYGYSAATALSASQALLNADTYALFANAVNLNC

SEQ ID NO: 63 - protein, 334 aa, Aspergillus niveus
LPAKTGEQLQKLDVALSQVDNTLIKAVVKNTGSEDITFVHLNFFRDTAPVKKVSLFRNTTEVPFHGIKQRLRSDGLSADALTVLAPGESIEDEFDIAATSDLSEGGSITISADGFVPIASGNKITGYVPFSSNELSVEVDAAQAASVASAVKPLDRRTKVASCSGSRSSALTQALRNTVSLANAAASAAQSGSSTRFQEYFKTTSSSVRSSVAARFRAVASEASSTSAGSTTYYCTDVYGYCSSNVLAYTLPAYNIIANCDIYYTYLPALTSTCHAQDQATTTLHEFTHAPGVYSPGTDDLGYGYDAATALSSSQALNNADSYALFANAVNLNC

SEQ ID NO: 64 - protein, 372 aa, Penicillium sclerotiorum
IPTGGKKSSFSVDQVAIPATKTKNFADTYARAISKFGGNVPSHVRAAAQQSGAATTTPEANDEEYLTPVNVGGTTLNLDFDTGSADLWVFSEQLPSSEQSGHSVYKPNNGTKLSGATWSISYGDGSSASGDVYKDTVSVGPVKATGQAVEAASKISAQFTRDSNNDGLLGLAFSSINTVKPKAQTTFFDTVKSSLASPLFAVTLKHNAPGTYDFGFVDSSKYTGSLAYTDVDNSQGFWEFTADSYKVGSQSGSSIKGIADTGTTLLLLDDEVVSAYYKQVSGASDSQSAGGYTFDCSADLPDFTVTISGYDAVVPGSLINYAPVSDGSSTCLGGIQSNSGIGFSIFGDIFLKSQYVVFDSNGPRLGFAAQSS

SEQ ID NO: 65 - protein, 371 aa, Penicillium bilaiae
VPTGGKKSFSINQVAIPATKTKNFAGNYAHAIAKYGGNVPSHVEAAAQQSGAATTTPESNDEEYLTPVNVGGTTLNLDFDTGSADLWVFSAELPSAEQSGHALYKPSNGTKLSGASWSISYGDGSSASGDVYKDTVSVGSVKATGQAVEAASKISAQFTKDKNNDGLLGLAFSSINTVKPKAQTTFFDTVKSSLASPLFAVTLKHNAPGTYDFGFIDKSKYTGSLAYADVDNSQGFWEFTADSYSVGSSKGSSIKGIADTGTTLLLLDDEVVSAYYKQVQGAQQDSSAGGYTFDCSSKLPDFTVTISGYDAVVPGDLINFAPASEGSSTCLGGIQSNSGIGFSIFGDIFLKSQYVVFDSNGPRLGFAAQSS

SEQ ID NO: 66 - protein, 373 aa, Penicillium antarticum
SPLVTPRKGFTINQETRAVTKSKTVNLPGVYAQALSKYGATVPQHVHAAAVSGSAVTTPEESDVEYLTPVNVGGTTLNLDFDTGSADLWVFSSELTSSQQSGHSIYKPSSSATKLSGSSWSISYGDGSSASGDVYKDTVTVGGVKATGQAVEAASKISSAFLQDVNNDGLLGLAFSSINTVSPRAQTTFFDTVKSQLDSPLFAVTLKHNAPGSYDFGYIDKSKYTGSLTYANVDDSQGFWSFTASSYKIGTTTGGSITGIADTGTTLLLLPDSVVSAYYKKVSGSQNSNYYGGYVFPCSATLPDFTVTINGYNAVVPGNLINFAQATTGSSTCYGGIQSNSGIGFSIFGDIFLKSQYVVFDSEGPRLGFAAQA

SEQ ID NO: 67 - protein, 370 aa, Penicillium sumatrense
VPTNNVASKFSVNQVSRPATKTTNFAANYGRALSKYGAGVPSHVEAAAAASGSAVTTPESNDVEYLTPVSIGGTTLNLDFDTGSADLWVFSTELSSSEQSGHSVYNPSKSGKKISGASWDISYGDGSGASGDVYTDTVTVGGVTASKQAVEAAKQISSQFQQDTDNDGLLGLAFSSINTVSPTPQKTFFDNVKSSLSQPLFAVALKHNAPGVYDFGFIDSSKHTGSIAYTSVDSSQGFWSFTVDGYKVGSKSGAGFDGIADTGTTLLLLDDSVVSAYYSQVSGAKNDNNAGGYVFDCSADLPDFSVTIGSYTATVPGSLINYGDSGDNSCIGGIQSNSGIGFSIFGDIFLKSQYVVFNANGPKLGFAPQA

SEQ ID NO: 68 - protein, 384 aa, Trichoderma lixii
LPTEGQKTASIEVTYNKNYVAHGPTALFKAKRKYGAPISDNLRAAVAAKHSLTKRQTGSANTNPSDSADDEYITSVSIGTPAQVLPLDFDTGSSDLWVFSSETPKSSASGHVTYSPSKSSTAKKLSGSTWSITYGDHSSSSGDVYTDVVSIGGFSVKTQAIESATKVSTQFVQDTVISGLVGLGFDVGNTVKPRAQKTWFSNAASSLAEPLFTADLRHQETGSYNFGFIDNSLAKGTIGYTPADGSEGYWGFTATGYSVGGAKLGRSSITGIADTGTTLLLLPDNVVDAYYNNVESAQYDDSQEGVVFDCSEDLPSFSFGVGGQTITISGDLLNLTPIEEGSSTCFGGLQSSADIGINIFGDVALKAALVVFDLGNERLGFAQK

SEQ ID NO: 69 - protein, 384 aa, Trichoderma brevicompactum
LPTEGQKTASVEVTYNQNYAAHGPTQLYKAKRKYGAPISDNLKAIVANRKALIKRQTGSAPNHPSDSADDEYITNVSIGTPAQVLPLDFDTGSSDLWVFSSETPKSSASGHTIYTPSKSSTSKKLSGATWSIEYGDKSTSSGDVYTDKVTVGGFSVSTQAVESATKVSAQFVQDTANSGLLGLAFDSINTVSPRQQKTWFSNAANSLAQPLFTANLNHQATGSYNFGFIDTSLASGPINYVPVDNSQGFWGFTASGYSVGGGKLNRSSLSGIADTGTTLLLLPDAVVNAYYANVESAEYDDEQEGVVFDCSEDLPTFSFGVGSGTITIPGDLLNLTPIDSSGQTCYGGLQSSSDIGINIFGDVALKAALVVFDLGNERLGWAQK

SEQ ID NO: 70 - protein, 379 aa, Penicillium cinnamopurpureum
IPTGVPNRKGFTVNQQVRPVTNGTKSKTLNLPAIYANALSKYGVAVPANIKAAAESGTATTTPEDNDIEYLTPVDVGGTTLNLDFDTGSADLWVFSSELPSSESSGHSIYKPSQSGKKLDGYSWKISYGDSSSASGDVYTDTVTVGGVTADGQAVEAAKKISQQFVQDKNNDGLLGLAFSSINTVQPKAQTTFFDTVKDQLDSPLFAVTLKHNAPGSYDFGFIDKSKYTGSLTYADVDKSDGFWAFTADGYSVGSGSSSSSRIKGIADTGTTLLLIDDEIVSAYYKQVDGAQESYSVGGYTFDCSTKLPDFNIKIGDYTAVIPGDVINYAPVQQGSSTCFGGIQSNSGLPFSIFGDIFLKSQYVVFDANGPRLGFAAQA

SEQ ID NO: 71 - protein, 350 aa, Bacillus lichenformis
AQPAKNVEKDYIVGFKSGVKTASVKKDIIKESGGKVDKQFRIINAAKAKLDKEALKEVKNDPDVAYVEEDHVAHALAQTVPYGIPLIKADKVQAQGFKGANVKVAVLDTGIQASHPDLNVVGGASFVAGEAYNTDGNGHGTHVAGTVAALDNTTGVLGVAPSVSLYAVKVLNSSGSGSYSGIVSGIEWATTNGMDVINMSLGGASGSTAMKQAVDNAYARGVVVVAAAGNSGSSGNTNTIGYPAKYDSVIAVGAVDSNSNRASFSSVGAELEVMAPGAGVYSTYPTNTYATLNGTSMASPHVAGAAALILSKHPNLSASQVRNRLSSTATYLGSSFYYGKGLINVEAAAQ

SEQ ID NO: 72 - protein, 360 aa, Bacillus subtilis
FSNMSAQAAGKSSTEKKYIVGFKQTMSAMSSAKKKDVISEKGGKVQKQFKYVNAAAATLDEKAVKELKKDPSVAYVEEDHIAHEYAQSVPYGISQIKAPALHSQGYTGSNVKVAVIDSGIDSSHPDLNVRGGASFVPSETNPYQDGSSHGTHVAGTIAALNNSIGVLGVAPSASLYAVKVLDSTGSGQYSWIINGIEWAISNNMDVINMSLGGPTGSTALKTVVDKAVSSGIVVAAAAGNEGSSGSTSTVGYPAKYPSTIAVGAVNSSNQRASFSSAGSELDVMAPGVSIQSTLPGGTYGAYNGTSMATPHVAGAAALILSKHPTWTNAQVRDRLESTATYLGSSFYYGKGLINVQAAAQ

SEQ ID NO: 73 - protein, 548 aa, Trametes cf versicol
TPTARNLKLHESREEIPAGFSLSGAASPDTTLKLRLALVQSNFAELEDKLYDVSTPSSANYGQHLSKEEVEQLVAPSAESVNAVNAWLTENGLTAQTISPAGDWLAFEVPVSKANELFDADFSVFTHDESGLKAVRTLAYSIPAELQGHLDLVHPTITFPNPNSHLPVVRSPVKPVQNLTSRAVPASCASTITPACLQALYGIPTTKATQSSNKLAVSGFIDQFANSADLKTFLGKFRTDISSSTTFTLQTLDGGSNSQSSSQAGVEANLDIQYTVGLASAVPTIFISVGDDFQDGDLEGFLDIINFLLNESAPPQVLTTSYGQNENTISAKLANQLCNAYAQLGARGTSILFASGDGGVSGSQSSSCSKFVPTFPSGCPFMTSVGATQGINPETAADFSSGGFSNVFARPSYQSTAVSSYLTALGSTNSGKFNTSGRAFPDIATQGVDFEIVVSGRTEGVDGTSCASPTLAAIISLLNDRLIAAGKSPLGFLNPFLYSAAGTAALTDITSGSNPGCNTNGFPAKAGWDPVTGLGTPNFAKLLTAVGL

SEQ ID NO: 74 - protein, 439 aa, Bos taurus
MAKEYFPFTGKIPFEGKDSKNVMAFHYYEPEKVVMGKKMKDWLKFAMAWWHTLGGASADQFGGQTRSYEWDKAECPVQRAKDKMDAGFEIMDKLGIEYFCFHDVDLVEEAPTIAEYEERMKAITDYAQEKMKQFPNIKLLWGTANVFGNKRYANGASTNPDFDVVARAIVQIKNSIDATIKLGGTNYVFWGGREGYMSLLNTDQKREKEHMATMLGMARDYARAKGFKGTFLIEPKPMEPSKHQYDVDTETVIGFLKAHGLDKDFKVNIEVNHATLAGHTFEHELACAVDAGMLGSIDANRGDAQNGWDTDQFPIDNFELTQAMLEIIRNGGLGNGGTNFDAKIRRNSTDLEDLFIAHISGMDAMARALMNAADILENSELPAMKKARYASFDSGIGKDFEDGKLTFEQVYEYGKKVEEPKQTSGKQEKYETIVALHCK

SEQ ID NO: 75 - protein, 591 aa, Saccharomyces cerevisiae
MLCSVIQRQTREVSNTMSLDSYYLGFDLSTQQLKCLAINQDLKIVHSETVEFEKDLPHYHTKKGVYIHGDTIECPVAMWLGALDLVLSKYREAKFPLNKVMAVSGSCQQHGSVYWSSQAESLLEQLNKKPEKDLLHYVSSVAFARQTAPNWQDHSTAKQCQEFEECIGGPEKMAQLTGSRAHFRFTGPQILKIAQLEPEAYEKTKTISLVSNFLTSILVGHLVELEEADACGMNLYDIRERKFMYELLHLIDSSSKDKTIRQKLMRAPMKNLIAGTICKYFIEKYGFNTNCKVSPMTGDNLATICSLPLRKNDVLVSLGTSTTVLLVTDKYHPSPNYHLFIHPTLPNHYMGMICYCNGSLARERIRDELNKERENNYEKTNDWTLFNQAVLDDSESSENELGVYFPLGEIVPSVKAINKRVIFNPKTGMIEREVAKFKDKRHDAKNIVESQALSCRVRISPLLSDSNASSQQRLNEDTIVKFDYDESPLRDYLNKRPERTFFVGGASKNDAIVKKFAQVIGATKGNFRLETPNSCALGGCYKAMWSLLYDSNKIAVPFDKFLNDNFPWHVMESISDVDNENWIAIIPRLSP

SEQ ID NO: 76 - protein, 444 aa, Bacillus subtilis
ETANKSNELTAPSIKSGTILHAWNWSFNTLKHNMKDIHDAGYTAIQTSPINQVKEGNQGDKSMSNWYWLYQPTSYQIGNRYLGTEQEFKEMCAAAEEYGIKVIVDAVINHTTFDYAAISNEVKSIPNWTHGNTQIKNWSDRWDVTQNSLLGLYDWNTQNTQVQSYLKRFLERALNDGADGFRFDAAKHIELPDDGSYGSQFWPNITNTSAEFQYGEILQDSASRDAAYANYMDVTASNYGHSIRSALKNRNLGVSNISHYAYDVSADKLVTWVESHDTYANDDEESTWMSDDDIRLGWAVIASRSGSTPLFFSRPEGGGNGVRFPGKSQIGDRGSALFEDQSITAVNRFHNVMAGQPEELSNPNGNNQIFMNQRGSHGVVLANAGSSSVSINTPTKLPDGRYDNKAGAGSFQVNDGKLTGTINARSVAVLYPDDIEIRCNTFFQ

SEQ ID NO: 77 - protein, 476 aa, Saccharomycopsis fibuligera
QPVTLFKRETNADKWRSQSIYQIVTDRFARTDGDTSASCNTEDRLYCGGSFQGIIKKLDYIKDMGFTAIWISPVVENIPDNTAYGYAYHGYWMKNIYKINENFGTADDLKSLAQELHDRDMLLMVDIVTNHYGSDGSGDSIDYSEYTPFNDQKYFHNYCLISNYDDQAQVQSCWEGDSSVALPDLRTEDSDVASVFNSWVKDFVGNYSIDGLRIDSAKHVDQGFFPDFVSASGVYSVGEVFQGDPAYTCPYQNYIPGVSNYPLYYPTTRFFKTTDSSSSELTQMISSVASSCSDPTLLTNFVENHDNERFASMTSDQSLISNAIAFVLLGDGIPVIYYGQEQGLSGKSDPNNREALWLSGYNKESDYYKLIAKANAARNAAVYQDSSYATSQLSVIFSNDHVIATKRGSVVSVFNNLGSSGSSDVTISNTGYSSGEDLVEVLTCSTVSGSSDLQVSIQGGQPQIFVPAKYASDICS

SEQ ID NO: 78 - protein, 487 aa, Debaryomyces occidentalis
QPIIFDKRDVGSSADKWKDQSIYQIVTDRFARSDGSTTADCLVSDRKYCGGSYKGIIDKLDYIQGMGFTAIWISPVVEQIPDNTAYGYAYHGYWMKNIDELNTNFGTADELKQLASELHSRSMLLMVDVVYNHYAWNGDGSSVDYSSFTPFNQQSYFHDYCLITNYNDQTNVEDCWEGDTEVSLPDLSTEDNEVIGVFQTWVSDFVQNYSIDGLRIDSAKHVDTASLTKFEDASGVYNLGEVYQGDPTYTCPYQSYMKGVTNYPLYYPVYRFFSDTSATSSELTSMISTLQSSCSDVSLLGNFIENHDQVRFPSVTSDTSLIKNAMAFIILGDGIPIIYYGQEQGLNGGSDPANREALWLSGYNTDSEYYELISKLNQIRNQAIKKDSAYSTYKSSVVSSSDHYIATRKGSDANQLISIFNNLGSNGSQDITVSNTGYSSGDKVIDIISCNSVSAGDFGSLSVSISGGMPQVYAPSSVLSGSGICNQ

SEQ ID NO: 79 - protein, 487 aa, Debaryomyces occidentalis
KPIFLSKRDAGSSAAAAWRSESIYQLVTDRFARTDGSTSATCNTGDRVYCGGTFQGIIDKLDYIQGMGFTAIWISPVVEQIPDDTGYGYAYHGYWMKDIYAINSNFGTADDLKNLSNELHKRNMKLMVDIVTNHYAWNGAGSSVAYSNYNPFNQQSYFHDYCLITNYDDQTNVEDCWEGDNTVSLPDLRTEDSDVSSIFNLWVAELVSNYSIDGLRIDSAKHVDESFYPSFQSAAGVYLLGEVYDGDPAYTCPYQNYMSGVTNYPLYYPMLRFFQGTSNSVDELNAMISSLESDCKDITLLGNFIENHDQPRLPSYTSDSALIKNAIAFNLMSDGIPIIYYGQEQGYSGSSDPNNREALWLSGYSTSNGYYKLISSVNQIRNQAIYKDSKYTTYWSDVLYASGHVIALQRGADDQRIVSVFNNLGSSGSQTVTFSTKYSGGEKVVDVLTCQTSYANSDSTLTVSISGGAPRIYAPASLIANSGICNF

SEQ ID NO: 80 - protein, 570 aa, Lipomyces kononenkoae
MCGSTLSASLYVYNDDYDKIVTLYYLTSSGTTGSTLALILPVWSNNWELWTLSAIAAGAVEITGASYVDSDTSVTYTTSLDLPLTTTSASVPTGTAANWRGRSIYQVVTDRFARTDGSITYSCDVTDRVYCGGSYRGIINMLDYIQGMGFTAIWISPIVENIPDDTGYGYAYHGYWMKDIFALNTNFGGADDLIALATELHNRGMYLMVDIVVNHFAFSGNHADVDYSEYFPYSSQDYFHSFCWITDYSNQTNVEECWLGDDSVPLVDVNTQLDTVKSEYQSWVKQLIANYSIDGLRIDTVKHVQMDFWAPFQEAAGIYTVGEVFDGDPSYTCPYQENLDGVLNYPVYYPVVSAFQRVGGSISSLVDMIDTLKSECIDTTLLGSFLENQDNPRFPSYTSDESLIKNAIAFTILSDGIPIIYYGQEQGLNGGNDPYNREALWPTGYSTTSTFYEYIASLNQIRNHAIYIDDTYLTYQNWVIYSDSTTIAMRKGFTGNQIITVLSNLGSSGSSYTLTLSNTGYTASSVVYEILTCTAVTVDLSGNLAVPMSGGLPRVFYPESQLVGSGICSM

SEQ ID NO: 81 - protein, 476 aa, Lipomyces kononenkoae
KTAAEWKELSIYQVITDRFATTNLTAPDCWIRAYCGGTWKGLERKLDYIQNMGFDAVWISPVIHNIEVNTTWGFAFHGYWGDDPYRLNEHFGTAADLKSLSDSLHARGMSLMVDVVINHLASYTLPQDVDYSLYPAPFNTSSAFHQPCPIDFSNQSSIEDCWLVTEPAPALVDLKNEDQVILDALINSVVDLVETYDIDGIRLDTARHVPKPSLAKFQEKVGVFVTGEALNQSVPYVAQYQGPLNSAINYPLWYALVDSFMGRTTFDYLESVVKSEQATFSDAHALTNFLDNQDQPRFASYLGDGNGDDVLRDENAATFLFFVSGIPVIYYGFEQRFDGGFDPVNREPMWTSGYNTSTPLYNYLARLNAIRKYAASITGTQVFYSDDTVFLGSGVSHMAMQRGPLVIVLTNVGQHIIDNTGYTVTGSQFSAGDSLTDLVSCTKVKVVGANGTFTSPSNGGKARIWIKSKYAGKFCS

SEQ ID NO: 82 - protein, 626 aa, Bacillus subtilis
ETANKSNELTAPSIKSGTILHAWNWSFNTLKHNMKDIHDAGYTAIQTSPINQVKEGNQGDKSMSNWYWLYQPTSYQIGNRYLGTEQEFKEMCAAAEEYGIKVIVDAVINHTTSDYAAISNEVKSIPNWTHGNTQIKNWSDRWDVTQNSLLGLYDWNTQNTQVQSYLKRFLDRALNDGADGFRFDAAKHIELPDDGSYGSQFWPNITNTSAEFQYGEILQDSASRDAAYANYMDVTASNYGHSIRSALKNRNLGVSNISHYASDVSADKLVTWVESHDTYANDDEESTWMSDDDIRLGWAVIASRSGSTPLFFSRPEGGGNGVRFPGKSQIGDRGSALFEDQAITAVNRFHNVMAGQPEELSNPNGNNQIFMNQRGSHGVVLANAGSSSVSINTATKLPDGRYDNKAGAGSFQVNDGKLTGTINARSVAVLYPDDIAKAPHVFLENYKTGVTHSFNDQLTITLRADANTTKAVYQINNGPETAFKDGDQFTIGKGDPFGKTYTIMLKGTNSDGVTRTEKYSFVKRDPASAKTIGYQNPNHWSQVNAYIYKHDGSRVIELTGSWPGKPMTKNADGIYTLTLPADTDTTNAKVIFNNGSAQVPGQNQPGFDYVLNGLYNDSGLSGSLPH

SEQ ID NO: 83 - protein, 483 aa, Bacillus subtilis
VNGTLMQYFEWYTPNDGQHWKRLQNDAEHLSDIGITAVWIPPAYKGLSQSDNGYGPYDLYDLGEFQQKGTVRTKYGTKSELQDAIGSLHSRNVQVYGDVVLNHKAGADATEDVTAVEVNPANRNQETSEEYQIKAWTDFRFPGRGNTYSDFKWHWYHFDGADWDESRKISRIFKFRGEGKAWDWEVSSENGNYDYLMYADVDYDNPDVVAETKKWGNWYANELSLDGFRIDAAKHIKFSFLRDWVQAVRQATGKEMFTVAEYWQNNAGKLENYLNKTSFNQSVFDVPLHFNLQAASSQGGGYDMRRLLDGTVVSRHPEKAVTFVENHDTQPGQSLESTVQTWFKPLAYAFILTRESGYPQVFYGDMYGTKGTSPKEIPSLKDNIEPILKARKEYAYGPQHDYIDHPDVIGWTREGDSSAAKSGLAALITDGPGGSKRMYAGLKNAGETWYDITGNRSDTVKIGSDGWGEFHVNDGSVSIYVQK

SEQ ID NO: 84 - protein, 589 aa, Bacillus subtilis
MMEYAAIHHQPFSTDAYSYDGRTVHIKIRTKKGDADHIRFIWGDPYEYNDGKWSANEQPMRKIAATEMHDYWFAEVVPPFRRLQYAFVVTDDHEDIFFGSSGVCPYNEKTLETIHYYFKFPFVHEADTFQAPEWVKSTVWYQIFPERFANGREDLSPKNALPWGSKDPGVNDFFGGDLQGIVDKLDYLEDLGVNGIYLTPIFSAPSNHKYDTLDYFSIDPHFGDPEIFRTLVSQLHQRGMRIMLDAVFNHIGSASPQWQDVVKNGDQSRYKDWFHIHSFPVTDDNYDRFAFTADMPKLNTANPEVQKYLLDIALYWIREFDIDGWRLDVANEVDHVFWKTFRQAVSTEKPDVYILGEIWHSAEPWLRGDEFHAAMNYPFTEPMIEYFADQTISASRMAHRVNAHLMNGMKQANEVMFNLLDSHDTKRLLTRCRNDEKKARALLAFMFAQTGSPCIYYGTEIGLDGENDPLCRKCMVWEKEKQNQDMLQFMKRLIALRKQENTLLTEGHLEWNLLDDKNDFISFSRTLDEKILIYFFNQGNVVQHISLRELNIDRNNKICDAWTEQPLHYHDVIAVQPGEFLILSAAAPV

SEQ ID NO: 85 - protein, 483 aa, Bacillus lichenformis
ANLNGTLMQYFEWYMPNDGQHWKRLQNDSAYLAEHGITAVWIPPAYKGTSQADVGYGAYDLYDLGEFHQKGTVRTKYGTKGELQSAIKSLHSRDINVYGDVVINHKGGADATEDVTAVEVDPADRNRVISGEHLIKAWTHFHFPGRGSTYSDFKWHWYHFDGTDWDESRKLNRIYKFQGKAWDWEVSNENGNYDYLMYADIDYDHPDVAAEIKRWGTWYANELQLDGFRLDAVKHIKFSFLRDWVNHVREKTGKEMFTVAEYWQNDLGALENYLNKTNFNHSVFDVPLHYQFHAASTQGGGYDMRKLLNGTVVSKHPLKSVTFVDNHDTQPGQSLESTVQTWFKPLAYAFILTRESGYPQVFYGDMYGTKGDSQREIPALKHKIEPILKARKQYAYGAQHDYFDHHDIVGWTREGDSSVANSGLAALITDGPGGAKRMYVGRQNAGETWHDITGNRSEPVVINSEGWGEFHVNGGSVSIYVQR

SEQ ID NO: 86 - protein, 478 aa, Aspergillus niger
ATPADWRSQSIYFLLTDRFARTDGSTTATCNTADQKYCGGTWQGIIDKLDYIQGMGFTAIWITPVTAQLPQTTAYGDAYHGYWQQDIYSLNENYGTADDLKALSSALHERGMYLMVDVVANHMGYDGAGSSVDYSVFKPFSSQDYFHPFCFIQNYEDQTQVEDCWLGDNTVSLPDLDTTKDVVKNEWYDWVGSLVSNYSIDGLRIDTVKHVQKDFWPGYNKAAGVYCIGEVLDGDPAYTCPYQNVMDGVLNYPIYYPLLNAFKSTSGSMDDLYNMINTVKSDCPDSTLLGTFVENHDNPRFASYTNDIALAKNVAAFIILNDGIPIIYAGQEQHYAGGNDPANREATWLSGYPTDSELYKLIASRNAIRNYAISKDTGFVTYKNWPIYKDDTTIPMRKGTDGSQIVTILSNKGASGDSYTLSLSGAGYTAGQQLTEVIGCTTVTVGSDGNVPVPMAGGLPRVLYPTEKLAGSKICSSS

SEQ ID NO: 87 - protein, 477 aa, Aspergillus niger
ATPADWRSQSIYFLLTDRFARTDGSTTATCNTADQKYCGGTWQGIIDKLDYIQGMGFTAIWITPVTAQLPQTTAYGDAYHGYWQQDIYSLNENYGTADDLKALSSALHERGMYLMVDVVANHMGYDGAGSSVDYSVFKPFSSQDYFHPFCFIQNYEDQTQVEDCWLGDNTVSLPDLDTTKDVVKNEWYDWVGSLVSNYSIDGLRIDTVKHVQKDFWPGYNKAAGVYCIGEVLDGDPAYTCPYQNVMDGVLNYPIYYPLLNAFKSTSGSMDDLYNMINTVKSDCPDSTLLGTFVENHDNPRFASYTNDIALAKNVAAFIILNDGIPIIYAGQEQHYAGGNDPANREATWLSGYPTDSELYKLIASRNAIRNYAISKDTGFVTYKNWPIYKDDTTIPMRKGTDGSQIVTILSNKGASGDSYTLSLSGAGYTAGQQLTEVIGCTTVTVGSDGNVPVPMAGGLPRVLYPTEKLAGSKICYG

SEQ ID NO: 88 - protein, 431 aa, Streptomyces avermitilis
SPPGTKDVTAVLFEWKFDSVARECTNTLGPAGYGYVQVSPPAEHIQGSQWWTSYQPVSYKIAGRLGDATAFQNMINTCHTAGVKVVVDTVVNHMSAGSGTGTGGSAYTKYNYPGLYSSYDMDDCTATITDYTNRANVQNCELVGLADLDTGEEYVRKTIAGYMNTLLGYGADGFRVDAVKHIPAADLANIKSRLTNPSVYWKQEVIYASGEAVQPTEYTGNGDVQEFRYAYDLKRVFNNENLAYLKNYGEGWGYLNSSVAGVFVDNHDTERNGSTLNYKDGANYTLANVFMLAYPYGAPDINSGYEWSDADAGPPGGGTVNACWQDGWKCQHAWPEIKAMVAFRNATRGESVTNWWDNGGDAIAFGRGAKGYVAINHESGSLTRTYQTSLTAGTYCNVQNNTGVTVDSSGRFTATLGANTALALYSGKSTC

SEQ ID NO: 89 - protein, 643 aa, Clostridium phytofermentans
MYTLKSKLRDLYRHPVGYDVINKILLQAGLSKGLIENPVIGALPLSFLNRIAGKKLGNGFFDALLALLNQSNDRLDPYSSKDKKITPTWWKEAVFYQIYPRSFMDGNGDGVGDLPGIISKLDYLKELGVDALWLSPIYDSPGDDNGYDIRDYQKIDSQFGTMEDFDLLLTELHARNMRLVMDLVVNHTSDEHHWFKEALKSSESTYRDYYFLRKEPNNWTSFFSGSAWNHYPEEDLWGLHLFSKKQMDLNWENPKLRQDIYQMIRWWLEKGVDGFRLDVINYISKETGLPDGDSFIGNLMGFTGIEHYFYGPKLHNHLQEIQKEAFTPYQAFSVGETPGIGMKMGKLLTDDSRGELNMMFSFDHLETSGHARFDQYEYDLNYYKSYIMDWMENFADTSWMSLFYDNHDNPRMLSKVDHTHTHRQELAKMLAMIQMTLKGTPFLYQGQELGMINKDFHEISNFRDVESINKYKELCEKMPKEEAFLQILAGSRDHARTPMQWSAKPGCGFSNAVPWIDSDGDELVCNAEIQMQDSESVLSFYRDLIALRRKTPALIYGDIEFTHKKRKDILIYTRYLEGETYLIICNLSNDEQKLPGNVPVSESLEGLESLSASADERKGLVLCNYPAKVMKSLRAYEGRVYRI

SEQ ID NO: 90 - protein, 1016 aa, Clostridium phytofermentans
ATDTITIHYHRDDGDYEKWNLWLWAEGKDGAAYYFDGEDAFGPYVSVSLDKSADRIGFIVRTDSWEKDVSEDRFIDTSLGDEIWISSGESTFSYEAPEGYEKEVSIESFQLKLNYLRYDEEYTDISFRLTFEDGTTDFLTKEHMRIENGILKAEKEVKYGKKITLDVLKNGLEEDYQGVSFSTAKIDEESKLEMYWMQGTGTISPKADFIKRSKEIESALITSMKEITVKLSVPCRVDDIKQDGFKLSPKLAVSKVEATSTRDSEYKTIKEGYADTFIITMEEPLDMSKKYALSKTDYGSRNLTLDSGLYTSEEFEAAYTYEGNDLGATYSKEKTVFKVWSPSAESISVLFYPHGEAKDGEKPEITYPMKQTGAGVWQAEIEGDLKNKYYVYQVTVDGKTKLVVDPYAKAAGVNGERGMVIDLSETDPDGFREHSSPEFKNPVDAVIYEIHVRDLSMNENSGIENKGKFLGFTETGTTNSAGLSTGLDHMKELGVTHVHLLPSFDYKTIDESKLGENKFNWGYDPQNYNLPEGSYTTDPYQGEVRVREYKEMVQALHENGLHVVMDVVYNHTYTAGDSNFTSLVPGYYYRTDINGNFTNGSGCGNETASERAMVRKFIVDSVVYWATEYKVDGFRFDLMGLHDIETMNMVREALDKIDPSILLYGEGWTGGSTPLPDSKQAIKNNAVELNERIACFSDDIRDAIKGSVFDASDTGFINSGKRNVSNRDESIKFGIVASVSHPQVNLSGVPYSSRFWANEPSQTINYASAHDNLTLWDKLLETNKMASKEELVQMNKLSAAIVLTSQGIPFFQAGEEMARTKKGNDNSYQSPDSINMLNWDNKTEYKDLFEYYKGLIALRKTYDAFRMQTAEEIQQKLEFVDSDSSVIAYRIHDAVKDGREIALIFNGTLEEKEVVLSANAWDVLVNQDTAGTDVIETITGGTIKVPAKSTLVLLENKDAVIKGDKDAVKGDEIQELPTNMQEVAEKESGNAWLWVGIATVCVLAGGVLFWILKRKR

SEQ ID NO: 91 - protein, 554 aa, Clostridium phytofermentans
MKNTNTLHPWWESAAAYQIYPRSFMDSNGDGVGDLQGIISRLPYLSELGFDLIWICPIYPSPNDDNGYDISDYQNIQKEYGTMEDFEELLHKAHERGIRVIMDLVVNHTSSSHPWFIESRSSKDNPKRDWYIWKDGKDNVEPNNWESIFGGSTWEYDEKSGQYFLHVFGKTMPDINWENTQVKKAIFDMICWWLDKGIDGFRVDAISHIKKPDFNDMPNPKNERYVSSFDKHMNQSGILDLLNELKENAFSKYDIFTVAEANGVRIEEIEEWVSSEKGIFNSLFQFDHLNLWNVGSEEGKISIKKLKNALTKWQKAAPMDGNVALVMENHDLVRSISRFGSEDKYWKESAKCLALMYYMQKGVPFIYQGQEIGMLNADYESHLDFRDDPTLFAYQDRINNGMSPAESLQVLKKSSRDNSRTPMQWDASPHAGFTTGTPWMKVNQNYHWLNAEVQKEDEDSILNFYKKLIKIKKETTGLIYGDYKLLMEESESIYAYTREYEEKNYLVVCNLSEELSELQIDLDITKGEILISNYEDRNSKEMLLKPYECRLYSL

SEQ ID NO: 92 - protein, 538 aa, Clostridium phytofermentans
MVKKWWHSSVVYQIYPRSFNDSNGDGIGDLKGIIEKLDYLKNLGIDVIWLSPVFKSPNDDNGYDISDYEDIMDEFGTLEDMELLLKEANNRGIKILMDLVANHTSDEHKWFIESRKSKDNAYRDYYIWRDPVDGHEPNDLGSTFSGSAWEWDEATGQYYLHLFSKKQPDLNWENPIVREEVWKSMNFWIDKGIGGFRMDVIELLGKIPDEKIISNGPMLHEYIREMNRNSFGDKDLLTVGECWGATPEIAKMYSNPDGSELSMVFQFEHIGLDQIPGKDKWDLQPLNLIDLKNVFHKWQTCFHDDGWNSLFWNNHDTPRIVSRWGNDKVYKIESAKMLATLLHGLKGTPYIYQGEELGMANIKFKDINQYKDIETLNMYKDRLNKGYKHEDIMESIYAKGRDNARTPMQWSDEIDGGFTTGTPWIEVNPNFTEINAKEQVSNPNSIYNYYKKLIEIRKNNEVIVYGDFEMLLPEDKNIFAYVRTLKDSKIVVVCNFYENEVEYNIPKEYEEKKEVLISNYGLSLTGRLRPFEAIMYRV

SEQ ID NO: 93 - protein, 555 aa, Clostridium phytofermentans
CKKADVNQNPSELNQDESQKEKEENDDEGTPEVSQDETKAVIPYDYVQNLNIIDDNYRNFYEIFVYSFYDSNGDGIGDINGVISKLDYINDGNDATDSDLGFNGIWLMPIMPSTTYHKYDVTDYYNIDPQYGTLEDFKNLVSECHKRGIHLIIDFVFNHTSAKHPWFLEAVSYLESLKEGEEPDLEKCPYVGYYHFTKDYNGSKTYYKAGTSNWYYEGVFWDQMPDLALENENVRKEIEDIAKYWLDLGVDGFRLDAAKEYFSGEKERNIEVLKWFSDYVKSVKEDADIVAEVWDEEGTIAAYYESGIPSLFNFPLSQHNGLITNTARKLGTSSGKNFAKTLLRLDEKYKEGNPKYIDAPFISNHDTTRISAQCVNDEDQMKMSAGMLLTMNGSPYVYYGEEIGMNSKGTKDENKRLPMQWSATDTTGITTPPANADSVEQKFPPVDEQMKDPLSLYNYYKRAVRIRNENPEIARGDMSVIEELCTKDISAIKKVYQGSEIVILYNINTESANILLKDAGLTELNIRGYLSVDGNAVTMSDGVVSMPKYSIVILK

SEQ ID NO: 94 - protein, 583 aa, Clostridium phytofermentans
MKFEAIYHRTSDNYCYPLNEEDLIINIKTGHDIERVFIYYGDPFEGGILGGNWTWNGVEEELIYKKNLTHHIWWTTTVKPKFKRCKYYFKLVANDTSYYYFEDGFYTEAEMNHQDKNLVYFTFPWMNSIDINKTPDWVNDTVWYQIFPERFNNGDKENDPKNVKAWGFHTVSNDEFYGGDLQGIINRLDYLADIGISGIYLTPIFEANTSHKYDTKDYMKIDPHFGDEKVFKNLVDTAHEKGIRIMLDGVFNHCGNQFAPWLDVLKNGPDSKYFNWFMINKWPFNKEDHNTNDGSFYSFAFTSRMPKLNTNNPEVIKYLLDVVEYWVKNFDIDGIRLDVANEISHRFCKDLRKLTKELKPDFYILGELWHDAITWLHGDEFDGVMNYPLATSLADYWVYPEKTNYDFECAINHNFTMYMQQTNDVLFNLLDSHDTNRLIDKVKDIDIFYQQLAVLFTMPGSPCIYYGTEIAMEGSYDPDCRRCMPWEDIDAGLFKDRIEIIKALIHLRKTNNAFKSRHYHFIEDKNNNRVIHYIKTDEDHKQVEVILNCSKDSIVVQRKGNELFSLLNEDTILKPKGVFIQQI

SEQ ID NO: 95 - protein, 575 aa, Clostridium thermocellum
MKLEAIYHKPYSEFAFPVAPDTLVIRLRTAKNDVNTCILIYHEKYDTSQRGKVKMDKVASDGMFDYYEVELNVGIKRIKYMFYLEDNYSIKWYSSDGFFDYMPQWGHFTYSYICKDDIFHEVEWFRNSTIYQIFPDRFAKFPPDTENSGKRTIHGGNIKGIIDRFDHLVKLGVDVVYLNPIFKSESYHRYDVVDYYEIDPMFGSKEELRELMDLCHKNGIKVIFDGVFNHSGDKFFAFRDVVEKGEKSKYANWYFINSFPVQGYPRPNYECFSFYGGMPKLNTGNPETAKYFLDVVKYWTVEFGVDGWRLDAADEVDRKFWRKLRDMLKDLNKDVVLIGEIFDEASSWLWGDQFDSVINYPLKAMINDLFAYRSIDVETFRNRISGYIMKFNKKVLSSLVNIISTHDTPRFLTLCNGDEKRFEMAVVFQFTFPGVPLIYYGDEIGMEGEGDPDCRRPMIWDEAKWNKKTLELYKFLIGLRKRFDALRTGEYGELPVTGCNGILAYRRGRGENGIIVAMNTLDRKENVVVETGDSFDTVKAFESLKDEERLNVDKKRINICLNPFEWRIYKACGEL

SEQ ID NO: 96 - protein, 655 aa, Thermobifida fusca
MIGRFPILDVSPVVDIGTAKAVVGETFPVRATVFREGHEALGAGVVLYTPEGQRQPLVPLREIAPGTDRYEAEVTVTSEGLWHFAIEAWSDPYATWCHDARIKIPAGQDVELMLEEGARLLERAARRVPRRPALAEIAAAMRDGSRSAHERLDLALSDLVRDELAERPLRELVTRSQRFPVMVSRRRALFGSWYEFFPRSEGAVLDTEDGEPRSGTFATAARRLPAIADMGFDVVYIPPIHPVGYSFRKGRNNSTVAQPGDPGSVWAIGSHEGGHDAIHPDLGTIDDFDAFVARARELGLEIAMDLALQASPDHPWVKEHPEWFTVRADGSIAYAENPPKKYQDIYPINFDKDPEGIFTEVRRIVRYWMSHGVRIFRVDNPHTKPVAFWERLLADIAATDPDVIFLSEAFTRPAMMHTLAKIGFHQSYTYFTWRNTKQELEEYLTELTGEAAAYMRPNFFVNTPDILHAYLQHGGRPAFEVRAILAATLSPTWGMYSGYELCENRALKPGSEEYLDSEKYQYKPRDWEAAEAAGITITPLIRKLNSLRRSHPALQELRNLRFHYADQPEIICYSKRLAGANHGADDTILVVANLDPHHTREATVWLDMPALGFAPGDHITVTDQLSGHSYHWVEANYVRLDPHVQTAHIFTVAPA

SEQ ID NO: 97 - protein, 572 aa, Thermobifida fusca
APSGNRDVIVHLFQWRWKSIADECRTTLGPHGFGAVQVSPPQEHVVLPAEDYPWWQDYQPVSYKLDQTRRGSRADFIDMVNTCREAGVKIYVDAVINHMTGTGSAGAGPGSAGSSYSKYDYPGIYQSQDFNDCRRDITNWNDKWEVQHCELVGLADLKTSSPYVQDRIAAYLNELIDLGVAGFRIDAAKHIPEGDLQAILSRLKNVHPAWGGGKPYIFQEVIADSTISTGSYTHLGSVTEFQYHRDISHAFANGNIAHLTGLGSGLTPSDKAVVFVVNHDTQRYEPILTHTDGARYDLAQKFMLAHPYGTPKVMSSYTWSGDDKAGPPMHSDGTTRPTDCSADRWLCEHRAVAGMVGFHNAVAGQGIGSAVTDGNGRLAFARGSAGYAAFNATNTAWTRTFTTSLPDGVYCDVANGTFVDGVCDGPSYQVSGGKFTATVPANGAVALHVEAPGSCGPDGCGTPPGGGDDCTTVTARFHATVTTWYGQEVAVVGSIPELGSWQPAQGVRLRTDSGTYPVWSGAVDLPAGVGFEYKYVKLNPDGTVEWEQGGNRIATVDDSGGGCSQNFYDSWR

SEQ ID NO: 98 - protein, 825 aa, Anaerocellum thermophilum
MLVRAYIDDFNEIVVVLSQMVHSVKKEDFKVFLNEEEIDIEKIDKIIPHSDNPAEAETRGYEICEQKGKIRFVLKEGHFDYHRKPYKKPVFVIGEMNDWQISPEWEMTYSKLRGRYELIKDLKEIKIGQKFKFAEGASQKLWYPPGFGNDIVITEYFDRETAFTNMIRIIPSNRLLPNLKYKVVYKSEHIWARPREILTRPEFFYPGELGIKYEPYGTYFKLWAPTAYKVKVKVFDESENFRFEKEMARSENGTWNIYLTGDLKNHYYLYEVWHYNYDEDEGFIVYEVPDPYSKASSSNSQKSFIFDPADTLIEGWQQDEFVKTIEKQQDAIIYEMHVRDFTIDKNSGVDEKFRGKFLGLCQKSFYKEKFSTGLLHLKELGITHIHLLPISDFGSVDDKNPDKKYNWGYDPVLYQCPEYWYSTKSGGIEALKELKTMIKTLHQNGIGVVMDVVFNHTYHTKGGKFSIFDKIVPGYFYRIDDYGDYSNATGCGNEIATEKPMVRKFILDTIIYWTEDFHIDGFRFDLMGLIDTLTMRMIAKEVRKRNPYALIYGEGWVMGDSMCLLEERATIESTAHHGYSIGLFNDRIRDSIRGDLDGFKTGYMHGNLSDIERLKQGIRAAIDDFAKEPDECVNYVSCHDNLTLFDKAQKTMVGEDIFWIDRVCRLANAIILTSQGIPFLHGGVEFNRSKGGHPNTYNAGDNINKIDWSLKEKFYDTFKFYCDLIKLRKEHVAFRMRSSGEIRKYLKFLPAPDGIVAFLISYPYDAWKKIIVAYNPFKEKKVITLPEGVWKIKANDGIIFSEENELEAIGSFEISPVSLFIAYQK

SEQ ID NO: 99 - protein, 1104 aa, Anaerocellum thermophilum
DEKTTLIIHYYRYNEDYQGWNLWIWPVEPVGAEGKAYEFTSKDDFGVKAVVELPGKVTKVGIIVRKGNWEAKDVAVDRFISGISGSKEVWLIEGEEQIYTSQPQKTPKMTAFIDGLNTIVVKLAKKADILSNNRTQGFKVTAFYEEVPIKKVEPVLPKINKNFKPEEAGYELIDGGTKVKFILKPGAGDFKFTDTSGKLDVYVSGTMNDWGGTASSEGKYKPLPAWKMTWNAEKGYYELVKELGKDGVVIGAKFKFTSWDGTSAKWYPDGMGNDKVIEELYTGNEKITKVDTFKITTEDELEPQVPYVVSKDSFKPTVAQARNILDNPKYYYKGNDLGCTYTKAYSAFRLWAPTAIGVILRLYDDYKTTKYKEYEMQQSFNGTWYLKINGDLKGKYYQYEVWHASNSITDDTIRKYVVPDPYSRATSANSERTLIFDPKDTNPVGWEKDTFVTLKNQEDAIIYETHVRDFTIDASSGVRPEFRGKYLGFTQTGAKGPNGVKTGIDHLKELGITHVHLLPTYDFGSIDETNPDKGYNWGYDPVLYQNVEGSYATNPNTIVRIKEYKQMVMALHKAGIGIIQDVVFNHTFQIGDAKFSIFDKIVPGYFYRKDKDGNYSNASGCGNEIATEKPMVRKFIIDTLTYLTKEYHIDGFRFDLMAAIDRVTMAKAQEEVRKINPSAVIYGEGWLAGSTPLDSSLRMEIGSFNQAGLHIGLFNDRIREAIRGNLDNESKGFMQGNYSFRLEDLKRGIQGGLGDFAADPDECINYVSAHDNLTLWDKLQKSVPNEPDYIKDKMGRLANAIVLTAQGVPFLHGGVEFNRTKYMNHNSYNAGDKINKYNWNLKVKWYNTFKYYQGLIALRKAHPAFRMTTAEDIQKYLTFIQTPKGTLGFRLTYPKDTWNDIIVVYNSTKKVQEVTLPEGNWVVVANGDEVGTTPIKNLTNFVAGKALVAPISMFVAYKSNEFPQGFTKVTGKDPVSLESSSTVTVPKVYGNGNIEVTFKVKVPHGTDDDVIYLAGSFGKAGLSDWNPGDKDGAIELVRLQDGTYTVTVKLNAGETFEYKYTRGSWTTVEKGANKEEIENRKLTVKDEGGGKMIVSDTVLNWADK

SEQ ID NO: 100 - protein, 611 aa, Anaerocellum thermophilum
MRKPHIIEAIIGNTKVLGQLDSNGILQRFYWPAVDYYQQLKLFLAAVFLDGLVFFEDENFKIKSGFVDDFVYFFEYKIADKTIFQLDFVDFETDSLVRLWETGFEDFYVFLEPMINSSSLFNAAKVDKENEIVYAYFKGTYIGLAFENKIKSFTVKNGIDDANDNQLEGWNEATNPQIAVKLKNTGKVVCFLAFGNSKDEIYQKLSYLKQKGYDEVYRQNKAFWEKKFSKVKLICTQDPKDMQLQKRSAYVFYVLQNSKTGGILAASEVDEKFFHCGGYGFVWGRDAAFIVSAMDELGLSREVEKFFGFKFSCQEKEGFWDQRYYTDGSLAPSWGIQIDETASVVWGFLEHCEKQNSLHLIDLHKEQLKKALLFLIAAVDSEKGVIFRSFDLWEEREGIHLYSNASIYAALKKAKKYFPELESEIEKKLKAIKNQMATRFYSPKLSRYVRSTDVRIPHEEFLKLPEENRYMQKDERYEITYYFKKQDEVVDISMLGIYYPFEMVDSSDKAFKATILAIERECQNSIVGGYKRYSDDRYIGGNPWILTTLWLAIYYKKTGQIDRAEKLFEWAKAHSLPNGLFPEQVDRITGKPAWVVPLAWSHAMYVLYLYE

SEQ ID NO: 101 - protein, 529 aa, Streptomyces avermitilis
MTSFRPAPAWLADAVFYQIYPQSFADSDGDGIGDFNGIVQRLDHLVWLGVTAVWLNPCFVSPFRDAGYDVSDYLNVAPRYGSADDLAELVDEAGRRGIRVLLDLVAGHTSDEHPWFTASANDPDDHRYIWAPEGRPDGFVTSPGTRPGAYLPNFFDTQPALNFGYGRKNPAEPWRQPVDAAGPRANREALRTIMDHWLGLGLAGFRVDMAASLVKDDPGRTETARIWTELRHWLDTAHPDAVLLSEWGEPEVSVPAGFHTDFFLQFGGATDGLPLRSLWSNGDGTVNEAWDPLDCFFDASGKGSPRPFVEAWRKASDAVGATGFVSLPTANHDFSRLNCGPRTAEQLPAAFAFQLTWPTLPAIYYGDEIGMRYVGGLPDKEGSVLGPRYNRAGSRTPMQWDDGPGAGFSTAPADRLYLPLDPSPDRPTVAAQRADDGSLLHLVRRLVALRASTPALGSGGSVEVLHTGYPFVYVRGGRYLVVVNPQRNEVRCPYDATREARALEASGVRVGNGTIEAEGFSYGVFDLGR

SEQ ID NO: 102 - protein, 431 aa, Streptomyces avermitilis; identical to SEQ ID NO: 88

SEQ ID NO: 103 - protein, 503 aa, Saccharomycopsis fibuligera
LPLQEGPLNKRAYPSFEAYSNYKVDRTDLETFLDKQKDVSLYYLLQNIAYPEGQFNDGVPGTVIASPSTSNPDYYYQWTRDSAITFLTVLSELEDNNFNTTLAKAVEYYINTSYNLQRTSNPSGSFDDENHKGLGEPKFNTDGSAYTGAWGRPQNDGPALRAYAISRYLNDVNSLNKGKLVLTDSGDINFSSTEDIYKNIIKPDLEYVIGYWDSTGFDLWEENQGRHFFTSLVQQKALAYAVDIAKSFDDGDFANTLSSTASTLESYLSGSDGGFVNTDVNHIVENPDLLQQNSRQGLDSATYIGPLLTHDIGESSSTPFDVDNEYVLQSYYLLLEDNKDRYSVNSAYSAGAAIGRYPEDVYNGDGSSEGNPWFLATAYAAQVPYKLVYDAKSASNDITINKINYDFFNKYIVDLSTINSGYQSSDSVTIKSGSDEFNTVADNLVTFGDSFLQVILDHINDDGSLNEQLNRNTGYSTSAYSLTWSSGALLEAIRLRNKVKALA

SEQ ID NO: 104 - protein, 497 aa, Saccharomycopsis fibuligera
VPVELDKRNTGHFQAYSGYTVARSNFTQWIHEQPAVSWYYLLQNIDYPEGQFKSAKPGVVVASPSTSEPDYFYQWTRDTAITFLSLIAEVEDHSFSNTTLAKVVEYYISNTYTLQRVSNPSGNFDSPNHDGLGEPKFNVDDTAYTASWGRPQNDGPALRAYAISRYLNAVAKHNNGKLLLAGQNGIPYSSASDIYWKIIKPDLQHVSTHWSTSGFDLWEENQGTHFFTALVQLKALSYGIPLSKTYNDPGFTSWLEKQKDALNSYINSSGFVNSGKKHIVESPQLSSRGGLDSATYIAALITHDIGDDDTYTPFNVDNSYVLNSLYYLLVDNKNRYKINGNYKAGAAVGRYPEDVYNGVGTSEGNPWQLATAYAGQTFYTLAYNSLKNKKNLVIEKLNYDLYNSFIADLSKIDSSYASKDSLTLTYGSDNYKNVIKSLLQFGDSFLKVLLDHIDDNGQLTEEINRYTGFQAGAVSLTWSSGSLLSANRARNKLIELL

SEQ ID NO: 105 - protein, 747 aa, Saccharomyces cerevisiae
FPTALVPRGSSSSNITSSGPSSTPFSSATESFSTGTTVTPSSSKYPGSKTETSVSSTTETTIVPTTTTTSVITPSTTTITTTVCSTGTNSAGETTSGCSPKTITTTVPCSTSPSETASESTTTSPTTPVTTVVSTTVVTTEYASTSTKQGGEITTTFVTKNIPTTYLTTIAPTSSVTTVTNFTPTTITTTVCSTGTNSAGETTSGCSPKTVTTTVPCSTGTGEYTTEATAPVTTAVTTTVVTTESSTGTNSAGKTTTSYTTKSVPTTYVFDFGKGILDQSCGGVFSNNGSSQVQLRDVVLMNGTVVYDSNGAWDSSPLEEWLQRQKKVSIERIFENIGPSAVYPSILPGVVIASPSQTHPDYFYQWIRDSALTINSIVSHSADPAIETLLQYLNVSFHLQRTNNTLGAGIGYTNDTVALGDPKWNVDNTAFTEPWGRPQNDGPALRSIAILKIIDYIKQSGTDLGAKYPFQSTADIFDDIVRWDLRFIIDHWNSSGFDLWEEVNGMHFFTLLVQLSAVDRSLSYFNASERSSPFVEELRQTRRDISKFLVDPANGFINGKYNYIVETPMIADTLRSGLDISTLLAANTVHDAPSASHLPFDIDDPAVLNTLHHLMLHMRSIYPINDSSKNATGIALGRYPEDVYDGYGVGEGNPWVLATCAASTTLYQLIYRHISEQHDLVVPMNNDCSNAFWSELVFSNLTTLGNDEGYLILEFNTPAFNQTIQKIFQLADSFLVKLKATWEQTGN

SEQ ID NO: 106 - protein, 621 aa, Aspergillus niger
NVISKRATWDSWLSNEATVARTAILNNIGADGAWVSGADSGIVVASPSTDNPDYFYTWTRDSGLVLKTLVDLFRNGDTSLLSTIENYISAQAIVQGISNPSGDLSSGAGLGEPKFNVDETAYTGSWGRPQRDGPALRATAMIGFGQWLLDNGYTSTATDIVWPLVRNDLSYVAQYWNQTGYDLWEVNGSSFFTIAVQHRALVEGSAFATAVGSSCSWCDSQAPEILCYLQSFWTGSFILANFDSSRSAKDANTLLLGSIHTFDPEAACDDSTFQPCSPRALANHKEVVDSFRSIYTLNDGLSDSEAVAVGRYPEDTYYNGNPWFLCTLAAAEQLYDALYQWDKQGSLEVTDVSLDFFKALYSDATGTYSSSSSTYSSIVDAVKTFADGFVSIVETHAASNGSMSEQYDKSDGEQLSARDLTWSYAALLTANNRRNVVPSASWGETSASSVPGTCAATSAIGTYSSVTVTSWPSIVATGGTTTTATPTGSGSVTSTSKTTATASKTSTSTSSTSCTTPTAVAVTFDLTATTTYGENIYLVGSISQLGDWETSDGIALSADKYTSSDPLWYVTVTLPAGESFEYKFIRIESDDSVEWESDPNREYTVPQACGTSTATVTDTWR

SEQ ID NO: 107 - protein, 593 aa, Aspergillus oryzae
VQPVLRQATGLDTWLSTEANFSRQAILNNIGADGQSAQGASPGVVIASPSKSDPDYFYTWTRDSGLVMKTLVDLFRGGDADLLPIIEEFISSQARIQGISNPSGALSSGGLGEPKFNVDETAFTGAWGRPQRDGPALRATAMISFGEWLVENSHTSIATDLVWPVVRNDLSYVAQYWSQSGFDLWEEVQGTSFFTVAVSHRALVEGSSFAKTVGSSCPYCDSQAPQVRCYLQSFWTGSYIQANFGGGRSGKDINTVLGSIHTFDPQATCDDATFQPCSARALANHKVVTDSFRSIYAINSGRAENQAVAVGRYPEDSYYNGNPWFLTTLAAAEQLYDALYQWDKIGSLAITDVSLPFFKALYSSAATGTYASSTTVYKDIVSAVKAYADGYVQIVQTYAASTGSMAEQYTKTDGSQTSARDLTWSYAALLTANNRRNAVVPAPWGETAATSIPSACSTTSASGTYSSVVITSWPTISGYPGAPDSPCQVPTTVSVTFAVKATTVYGESIKIVGSISQLGSWNPSSATALNADSYTTDNPLWTGTINLPAGQSFEYKFIRVQNGAVTWESDPNRKYTVPSTCGVKSAVQSDVWR

SEQ ID NO: 108 - protein, 579 aa, Rhizopus oryzae
ASIPSSASVQLDSYNYDGSTFSGKIYVKNIAYSKKVTVIYADGSDNWNNNGNTIAASYSAPISGSNYEYWTFSASINGIKEFYIKYEVSGKTYYDNNNSANYQVSTSKPTTTTATATTTTAPSTSTTTPPSRSEPATFPTGNSTISSWIKKQEGISRFAMLRNINPPGSATGFIAASLSTAGPDYYYAWTRDAALTSNVIVYEYNTTLSGNKTILNVLKDYVTFSVKTQSTSTVCNCLGEPKFNPDASGYTGAWGRPQNDGPAERATTFILFADSYLTQTKDASYVTGTLKPAIFKDLDYVVNVWSNGCFDLWEEVNGVHFYTLMVMRKGLLLGADFAKRNGDSTRASTYSSTASTIANKISSFWVSSNNWIQVSQSVTGGVSKKGLDVSTLLAANLGSVDDGFFTPGSEKILATAVAVEDSFASLYPINKNLPSYLGNSIGRYPEDTYNGNGNSQGNSWFLAVTGYAELYYRAIKEWIGNGGVTVSSISLPFFKKFDSSATSGKKYTVGTSDFNNLAQNIALAADRFLSTVQLHAHNNGSLAEEFDRTTGLSTGARDLTWSHASLITASYAKAGAPAA

SEQ ID NO: 109 - protein, 644 aa, Clostridium thermocellum
MANTYFNDAIIGNSGMLVCLTRNGELTRLFWPNIDYPQHFEKMATGIFYTGQKNSTSWFYEDNWHHTQYYVEDTNILKTICEDGGRGLRVEQTDFVLKDRDVMVRRYVIENIGPNEVDLGFVQYSSTVSTTPELRSTLFDFNVDALIHYRHNYYISISSDSEVVQFQLGNNAFDCARYTELYGYDSIGMMKDGAMSFNIGKIEPGGKKTFNLFICASHTLKGVKELVRWCRKMNVDEEYEKTRKYWLDFLKNARLIVTGDKNIDNLYKRSILVFKLMSDERTGGLLASAEIDEGFTRCGRYAYCWGRDAAFITGALDTAGLTEAVDKFYQWAVMTQDDDGSWQQRYHMDGNLAPSWGLQIDETGTLIWGMLKHYEVTKNIDFLKSMWESIKKGVEFLTRFIDSDTGLPAPSYDLWEERVGEHTYSSAAVYAGIKAGAEAARILGASEELIEKWEKAASDMKASIEKNFWRDEAGRFIRSVRTKLNPWGSEHSPYTTVIKVNEKGYFRDVTLEDWTIDVSLLGVSIPFGVFDVHDERVKKTVEAIERALTSHPVGGIKRYENDNYIGGNPWVLATLWVALYYIEIKEYEKAKDYLRWATKSCTALGLLPEQVSKDNGEPCWVIPLTWSHAMYVLVLAGLKEAGVL

SEQ ID NO: 110 - protein, 644 aa, Clostridium thermocellum
MQKSYYNNAITGNSSMLACFSERAELLRLFWPDIDYIQNLDKMFLGLFEKNKTGSTVWLNDIRCEHHQEYLPDSNIIKNMVTNFFDGYKVVLYDFVHPEMDVLVRRFEIENLRGESRELGLMSFSAATSSDSEVACSLFDFMNEALVHYKPDSYIAVTSDIPVYQFQIGNNANDAAVNTYLYGKDDIGMMKDAAISWDLGVFQPHAVKTTNVYLCAADTLKSCKALVRRVKTVGGLTAFRETGRYWKDYLEKTTKLKSGNTLLDDLYKRSLLVFRLMYSKKSGGLMAAPEVDEYFTKCGKYAYCWGRDAAFITGALDIGGLCESVDHFYKWAVNVQDEDGSWQQRYHMNGNLGPCWGLQVDETGTIIWGMLNHYNYTKNTDFLKSVWDSVKAAADFLVRFIDSETGLPRPSFDLWEERYGEHAYSSASVCAGLKSASEMARILGKPSQEYIQWETTADSIKKAIVKYFWKEDYRRFIRSIRVKLNGFGQEPSSDTMLIKVNPKGYVRDVTKEDWIVDVSLVGLGIPFEIFELNDPMLRDTVSLIEQVLTAQGVGGIKRYENDTYIGGNPWILTTLWIALYHAKSGNYKKAKEYLIWAASGKTELGLLPEQINRDTGKPEWIIPLTWSHAMYVHVYSELINAGVL

SEQ ID NO: 111 - protein, 608 aa, Arxula adeninivorans
DSCHTFTLANSPPDDKAVALSSYSYCGGYLSASAFVKNLSYDKLVTLYWTNADNKSTPLNAGSLDYVKAASDDQSWELWSLNVTTVPDGVDALLNITYVAASIGKTNSQQLNVQVEATGDPIPTPQIPTIYKPYASPSDFSDDITNWLKPSNDSQTGIAKSFLFNNINIPGAAPGTVIAAQSYSEPDYAYTWVRDASLVMDVVNRLYSSAKSEEKRQLYEKILFQYAKAGAQEQNDPTAISGMGEPKFYLNNTAFTGSWGRPQNDGPATRAITLIEFANAYLANGGSQDTVREQLYDSDKYPQVAPIKKDLQFVASNWSSPSFDLWEEEESAHFYTRLVQRKALLLGADFANDMGDHELSDKLKTQASKLSDTLPEFWDSARQLILYEYGPVLRGKYSYKDISVVLGVMHGYANDNVFSYTNDQILATAYQVSTSFLDVYKVANTTSDESGKPLGIPVGRYPEDVYDGVGTSQGNPWYLTTMAMAEFLYRSVQEFEDAGSIIISDTSLPFWKYFASSVDHKAGAKYNKNDQSFKTSLKSLTGWGDAFMRRAKYHTPSSGHMSEEFNRTTGEPRGAKDLTWSYASLLSAAFAREELRNQKNYLTNVADL

SEQ ID NO: 112 - protein, 595 aa, Hormoconis resinae
APTELKARDLSSFIASERAIALQGALNNIGPDGSAVPGAGAGFVVASPSKANPDYFYTWSRDSALTLKMIIDEFILGNTTLQTIIEQYIHAQAVLQTVSNPSGTFLPDGVGLGEPKFMVDGTRFNGPWGRPQRDGPALRAIALMTYSNWLIKNGQFAEAKTKIWPIIANDLSYVGQYWNQSGFDLWEETYASSFFTIQNQHRALVEGAQLAHDLGVTCTGCDQAPEVLCFLQSFWNGKYIVSNINVNNGRTGLDGNSILGAISTFDIDAYCDSPTLQPCHSQSLANFKVLTDTFRNLYTINAGIPEGQGVAVGRYAEDVYMGGNPWYLITTAAAEFLYDAVAQWKARHVLTVDETSLAFFKDIYPEVTVREYKSGNANSPFAQIMDAVTAYADSYVAIAEKYIPSNGSLSEQFNRDTGTPLSAIDLTWSYAAFITMSQRRAGQYPSSWGSRNALPPPTTCSASSTPGIYTPATAAGAPNVTSSCQVSITFNINATTYYGENLYVIGNSSDLGAWNIADAYPLSASAYTQDRPLWSAAIPLNAGEVISYQYVRQEDCDQPYIYETVNRTLTVPACGGAAVTTDDAWMGPVGSSGNC

SEQ ID NO: 113 - protein, 601 aa, Aureobasidium pullulans
LPSPESIQERATGSLSSWLSSENTVALQGVLNNIGASGSKASGASAGVVVASPSKSNPDYFYTWTRDSALVFKALVDQLIAGNKSLEPLIQQYISAQAKLQTVNNPSGGLCSGGLAEPKFEVDLTPFTGAWGRPQRDGPALRATAMIAYSRYLIANGNTTTVNNIIWPIVQNDLSYVTQYWNQTTFDLWEEINSSSFFTTAVQYRALVEGNNLATQLGKSCPNCVSQAPLVLCFLQSYWTGSYALSNTGGGRSGKDANSILTSIHIFDPAASCDSTTFQPCSDKALANHKVVTDSFRSIYSINQGIAQGSGVAVGRYPEDSYYNGNPWYLNTFAAAEQLYDAVYQWKKIGSISITSISLPFFKDVYSSAAVGTYSSSTVTFTSIVNAVQTYADSYMSIAQKYTPSNGALSEQYNRADGTPLSAVDLTWSYAAFLTAYNARANVLPASWGASSAKLPNSCSSGSATGPCAAATNTNWGNPGSPSTGTPTTTTGGSCTTPTSIAVTFNEQKTTSYGENIYIVGSIPALGNWNTANAVALSASKYTSSNPLWTVTINFATGTSFNYKYIKKAQDGSVTWESDPNRSYTVTGNCAGTATENDSWR

SEQ ID NO: 114 - protein, 718 aa, Bacillus subtilis
MVSIRRSFEAYVDDMNIITVLIPAEQKEIMTPPFRLETEITDFPLAVREEYSLEAKYKYVCVSDHPVTFGKIHCVRASSGHKTDLQIGAVIRTAAFDDEFYYDGELGAVYTADHTVFKVWAPAATSAAVKLSHPNKSGRTFQMTRLEKGVYAVTVTGDLHGYEYLFCICNNSEWMETVDQYAKAVTVNGEKGVVLRPDQMKWTAPLKPFSHPVDAVIYETHLRDFSIHENSGMINKGKYLALTETDTQTANGSSSGLAYVKELGVTHVELLPVNDFAGVDEEKPLDAYNWGYNPLHFFAPEGSYASNPHDPQTRKTELKQMINTLHQHGLRVILDVVFNHVYKRENSPFEKTVPGYFFRHDECGMPSNGTGVGNDIASERRMARKFIADCVVYWLEEYNVDGFRFDLLGILDIDTVLYMKEKATKAKPGILLFGEGWDLATPLPHEQKAALANAPRMPGIGFFNDMFRDAVKGNTFHLKATGFALGNGESAQAVMHGIAGSSGWKALAPIVPEPSQSINYVESHDNHTFWDKMSFALPQENDSRKRSRQRLAAAIILLAQGVPFIHSGQEFFRTKQGVENSYQSSDSINQLDWDRRETFKEDVHYIRRLISLRKAHPAFRLRSAADIQRHLECLTLKEHLIAYRLYDLDEVDEWKDIIVIHHASPDSVEWRLPNDIPYRLLCDPSGFQEDPTEIKKTVAVNGIGTVILYLASDLKSFA

SEQ ID NO: 115 - protein, 710 aa, Bacillus licheniformis
MPGISRPFEAYLDEMRTITVLVPKSRASSCSPPFLLEDDQGERIELSVKAQVELEEQFKYVLESSCTVPFGRVHKVCCEESVWTDLQIGSVTRSAAFDKAFFYDGRLGAFYSKGSTLFKVWAPTASAAAIKLEDPDSLQTNTFQMMRRKKGVFEVTVEGDLNGWSYLYELYVNGKPLLTVDPYAKAVTANGEKGVVLDPEEVKVEKHRAPRLHSPCDAVIYEVHIRDFSIHEDSGMRHKGKYVAFTEDGTETSGGFSTGIAYLKELGVTHIEVLPFHDFAGVDELSPDQSYNWGYNPLHFNAPEGSYSLDPQNPKCRITELKTMIQSLHKHGFSVIMDAVYNHVYKRETSPFEKTVPGYFFRHNEYGFPSDGTGVGNDIASERLMVRKYILDSVRYWLEEYDVDGIRFDLMGILDIETVRQISTLAENVKPGVPLFGEGWDLNTPLDSGQKATLQNAGKVPAVGFFNDRFRNAVKGSTFELSDRGYALGDTGKKAALQHGIAGSPGFLQPAQSINYVECHDNHTFWDKMALCFEEDADTKRLRQRLAVSIVLLSQGVPFLHAGQEFCRTKNGDSNSYRSGDDINKLDWEKRAELCEDVEYVRQLIRLRRSHPAFRLQKEEEVKEHLSFMDGTGEVTAYKLKNIAAIDPWNEIIVVHCPFAKKETLKLPDQKQYLLHCDPFTFFNGKVQAEKRLRLNGIGTYVLYEPKGIF

SEQ ID NO: 116 - protein, 918 aa, Oryza sativa
MAVGEECAAAVASQGFVSDARAYWVTRSLIAWNVNDQDTSLFLYASRDATMHVSDGAIHGYDSKIELEPEHASLPDNVAEKFPFIRSYRTFRVPSSVDVTSLVKCQLAVASYDAHGRHQDVTGLQLPGVLDDMFAYTGPLGAVFSDKDVDLYLWAPTAQDVRVCFYDGPAGPLLQTVQLKELNGVWSVTVPRYRENQYYLYEVKVYHPSTSQVEKCLADDPYARGLSANGTRTWLVDINSETLKPASWDELSDEKPNLESFSDISIYELHIRDFSAHDSTVDCNSRGGFRAFTFQDSAGIRHLRKLSAAGLTHVHLLPSFHFASVDDNKSNWKFVDEAQLAKLPPGSDEQQAAIVSIQQEDPYNWGYDPVLWGVPKGSYASNPDGPSRIIEYRQMVQALNRIGLRVVMDVVYNHLDSSGPFGVSSVLDKIVPGYYLRRNVNGQIENSAAMNNTASEHFMVDRLIVDDLLNWAINYKVDGFRFDLMGHIMKSTMFTVMSICTISTIIKIKDVFADTLIRAKSAIRSLTRDVHGVDGSKIYLYGEGWDFGEVAQNKRGINASQINMSGTGIGSFNDRIRDSVNGGNPFGNPLQQGFSTGLFLEPNGYYQGNEADTRRELATYADHIQIGLAGNLKDYVLRTHTGEAKKGSDIYTFDGSPVGYTSSPVETINYVSAHDNETLFDIVSIKTPIGLSIDEKCRINHLASSMIALSQGIPFFHAGDEILRSKSLDRDSYNSGDWFNKLDFTYETNNWGVGLPPRDKNEENWHLIKPRLENPSFRPLKNHILSVFDNFVDILKIRYSSPLFRLSTASDIEQRVRFHNTGPSMVPGVIVMSIKDAQNEKCKMAQLDKNFSYVVTIFNVCPHEVSIEIHDLASLGLELHPIQVNSSDALVRQSAYEASKGRFTVPRRTTAVFVQPRC

SEQ ID NO: 117 - protein, 963 aa, Triticum aestivum
MPMPMRTMLLRHLSPAPALPNPRRSSASSPQRRPARARPPPLHSARATALRARRTPMAAGETGASVSVSAAEAEAEATQAFMPDARAYWVTSDLIAWNVSEQEAASVYLYASRTAAMGLSPSNGGIQGYDSKVELQPESAGLPETVTQKFPFISSYRAFRVPSSVDVASLVKCQLVIASFGADGKHVDVTGLQLPGVLDDIFAYTGPLGAVFREDSVSLHLWAPTAQDVSVCFFDGPAGPVLETVQLKESNGVWSVTGPREWENRYYLYEVDVYHPTKAQVLKCLAGDPYARGLSANGARTWLVDINNETLKPASWDELADEKPKLDSFSDITIYELHIRDFSAHDGTVDSDSCGGFRAFAYQASAGMQHLRKLSDAGLTHVHLLPSFHFAGVDDIKSNWKFVDECKLATFPPGSDMQQEAVVAIQEEDPYNWGYNPVLWGVPKGSYASDPDGPSRIIEYRQMVQALNRIGLRVVMDVVYNHLDSSGPCGISSVLDKIVPGYYVRRDTNGQIENSAAMNNTASEHFMVDRLIVDDLLNWAVNYKIDGFRFDLMGHIMKHTMMRAKAALQSLTRDAHGVDGSKIYLYGEGWDFAEVARNQRGINGSQLNMSGTGIGSFNDRIRDAVNGGNPFGNPLQQGFNTGLFLEPNGFYQGNEADTRRSLATYADQIQIGLAGNLRDYVLITHTGETKKGSEIHTFDGLPVGYTSSPIEIINYVSAHDNETLFDVISVKTPMNLSVDERCRINHLASSMMALSQGIPFFHAGDEILRSKSIDRDSYNSGDWFNKLDFTYETNNWGVGLPPSEKNEDNWPLMKPRLENPSFKPAKGHILAALDSFVDILKIRYSSPLFRLSTASDIKQRVHFHNTGPSSVPGVIVMGIEDARDEKPEMAQLDANFSYVVTVFNVCPHEVSMDIPALASMRLELHPVQVNSSDALVGKSVYEAATGRFTVPRRTVSVFVEPRC

SEQ ID NO: 118 - protein, 647 aa, Clostridium phytofermentans
MDEFWNSIDGEKQYYYDGNDLGCTYTNRSTKLKVWAPTASMVVVNLYQNGNAGKPYITEIMKKEESGIWSVCLLGDLEGVYYTYLVTVDGQTKEAVDPYARTTGLNGKRAMILDLEKTNPTGFLEDTKPKFDSFLDAVIYELHIRDLSMESDSGIKEKGKLLGLTELNTRNSDGLTTGLSHILDLGVTHIHLLPCFDYASVDEENSSIFNWGYDPENYNVVEGSYSTNPYDGAVRVKEFKTLVQSLHENGLRVIMDVVYNHTMKTEESNFNKIVPDYYYRKVGDKFSDASACGNETASERLMVRKFIVDSIIYWAKEYHIDGFRFDLMGIHDIETMNEVRKVLDQIDPSIILYGEGWVGGDSPLPAGQRAMKANMSMLPGIAAFSDDFRDGLKGSVFLAEEKGFATGDSDKKESVKFGVVASTLHPQIDYKKVNYSDSPWALEPAQCINYVSAHDNYTLWDKIACSCKEDTYEIRVKKNKLCAAIVFTSQGIPFLQAGEEMLRNKPSSEIAGEFVENSYNSSDSVNCIKWSNKANVIDVVSYYEGLIRFRKEHKALRMQSAKEISKRLTFLPEEREDVISYLIQGDLVDKTLCVIYNSSEEKVTIRLPESDWTVYIDGNNSGVEPLYEVKGTTVEVEPISCMVLVKD

SEQ ID NO: 119 - protein, 1764 aa, Streptomyces avermitilis
ATPPAPPSDAKLAAEPARHDATREQFYFVMPDRFANGDTSNDKGGLTGSRLSTGYDPTDKGFYQGGDLKGLTRKLDYIKGLGTTSIWLAPIFKNQPVQGTGKDASAGYHGYWITDFTKVDPHFGTNKDLETLISKAHAKGMKVFFDVITNHTADVVDYEEKSYGYLSKGAFPYLTKDGRPFDDAGYTDGPRKFPAVDGDSFPRTPAVAARKKNAKVPSWLNDPTMYHNRGDSTFAGESSTHGDFSGLDDLWTERPEVVRGMEKIYEKWVRDFGIDGFRIDTVKHVNTEFWTQWATALDAYAKKRGKDDFFMFGEVYSADTSVTSPYVTQGRLDSTLDFPFQDAARSYASQGGSAKKLASVFGDDYKYTTDKANAYEQVTFLGNHDMGRIGYFLNQDNPKATDAELLRKDRLANELMFLSRGNPVVYYGDEQGFTGSGGDKDARQTMFASKVADYLDDDEIGTDRGHASDAYDTSAPLYKEIAALSKLRKDNPALADGIQTERYAADGAGVYAFSRTDARTGTEYVVAVNNADKASAATFATGSADTAFKGIHGTDDVLKSDADKKITVTVPAGAAVVLKAAGRPGTPAAKPSLTLKAPDAGATGTVELSADVDGGRLNRVVFAAQVGNAKWRTLGSADHAPYRVTQTIGKDVPAGTALRYKAVVIDAAGRTASATAASTTGTPPAAETPTASSRDYAIVHYKRPDGDYTDWRLYAWGDLADGESTTWPAGHDFVGRDAYGAFAYVKLKPGASTVNFLVIDKDGDKDVSADRTIDVTKAGEVWVEQGKETVRTERPDYPAQDKTKAVIHYHRADGDLTGWGLHVWTGAATPTDWSKPLEPVRTDAYGAVFEVPLTDGATSLSYIIHKGDEKDLSADRSLDLTADGHEVWLLNGQENHLLPQPAGSAAALDLTTSKAVWIDRNTVAWNGSDAAASTQLLSSRDGSIAVKDGSLTSDDERWLRLSKTSLTDAQKAAFPHLKSYTAWSVDPRDRDRVREALAGQVVASQRAANGAVLAATGVQLAGVLDDLYDATKADLGPTFRGGHPTLAVWAPTAQSVSLELDGAHVRMKRNNATGVWSVTGPASWKGKPYRYVVKVWAPTVRKVVTNKVTDPYSVALTTDSERSLVVDLDDRSLAPSGWSSLKKPKAVPLRDAEIQELHIRDFSVADRTVPAKDRGTYLAFTDKNSDGSRHLRQLAESGTSYVHLLPAFDIATIAEKKSGQQATDCDLASYAADSEKQQECLTAVAAKDAYNWGYDPYHYTVPEGSYATDANGTRRTVEFRRMVKSLNQDGLRVVMDVVYNHTAAAGQAGTSVLDRIVPGYYQRLLADGSVATSTCCANTATENAMMGKLVVDSLVTWAKEYKVDGFRFDLMGHQPKANILAVRKALDALTVAKDGVDGKKIILYGEGWNFGEVADDARFVQATQKNMAGTGIATFSDRARDAVRGGGPFDADPGVQGFGSGLYTDPNSSDANGTPAEQKARLLHYQDLIKVGLSGNLAKYRFTDSSGKEVTGSEVDYNGTGAGYADAPGDALAYADAHDNESLYDALTYKLPKGTPAGDRARMQVLAMATAALAQGPSLSQAGSDLLRSKSLDRNSYDSGDWFNAIHWNCQDGNGFGRGLPMAADNKSKWPYATPLLTSVKVGCDQIEGTSAGYQDLLRIRTTEPDFSLSTAGQVQSKLTFPLSGKDETPGVITMKLGDLVVVFNATPDQQEQTVAALAGKDYALHPVQAAGADPIVKSASYTAKSGMFAVPGRTVAIFSQVAR

SEQ ID NO: 120 - protein, 1079 aa, Klebsiella pneumoniae
SSSSPSGSPGSPGNPGNPGTPGTPDPQDVVVRLPDVAVPGEAAQASANQAVIHLVDIAGITSSTPADYATKNLYLWNNETCDALSAPVADWNDVSTTPTGSDKYGPYWVIPLTKESGCINVIVRDGTNKLIDSDLRVSFGDFTDRTVSVIAGNSAVYDSRADAFRAAFGVALADAHWVDKTTLLWPGGENKPIVRLYYSHSSKVAADSNGEFTDKYVKLTPTTVSQQVSMRFPHLASYPAFKLPDDVNVDELLQGETVAISAESDGILSSATQVQTAGVLDDTYAAAAEALSYGAQLTDSGVTFRVWAPTAQQVELVVYSADKKVVASHPMTRDSASGAWSWQGGSDLKGAFYRYAMTVYHPQSRKVEQYEVTDPYAHSLSTNSEYSQVVDLNDSALKPEGWDGLTMPHAQKTKADLAKMTIHESHIRDLSAWDQTVPAELRGKYLALTAQESNMVQHLKQLSASGVTHIELLPVFDLATVNEFSDKVADIQQPFSRLCEINSAVKSSEFAGYCDSGSTVEEVLTQLKQNDSKDNPQVQALNTLVAQTDSYNWGYDPFHYTVPEGSYATDPEGTARIKEFRTMIQAIKQDLGMNVIMDVVYNHTNAAGPTDRTSVLDKIVPWYYQRLNETTGSVESATCCSDSAPEHRMFAKLIADSLAVWTTDYKIDGFRFDLMGYHPKAQILSAWERIKALNPDIYFFGEGWDSNQSDRFEIASQINLKGTGIGTFSDRLRDAVRGGGPFDSGDALRQNQGVGSGAGVLPNELTSMTDDQARHLADLTRLGMAGNLADFVLIDKDGAVKKGSEIDYNGAPGGYAADPTEVVNYVSKHDNQTLWDMISYKAAQEADLDTRVRMQAVSLATVMLGQGIAFDQQGSELLRSKSFTRDSYDSGDWFNRVDYSLQDNNYNVGMPRSSDDGSNYDIIARVKDAVATPGETELKQMTAFYQELTALRKSSPLFTLGDGATVMQRVDFRNTGADQQTGLLVMTIDDGMQAGASLDSRVDGIVVAINAAPESRTLQDFAGTSLQLSAIQQAAGDRSLASGVQVAADGSVTLPAWSVAVLELPQGESQGAGLPVSSK

SEQ ID NO: 121 - protein, 546 aa, Rhizomucor pusillus
ATSDDWKGKAIYQLLTDRFGRADDSTSNCSNLSNYCGGTYEGITKHLDYISGMGFDAIWISPIPKNSDGGYHGYWATDFYQLNSNFGDESQLKALIQAAHERDMYVMLDVVANHAGPTSNGYSGYTFDDASLYHPKCTIDYNNQTSIEQCWVADELPDIDTENSDNVAILNDIVSGWVGNYSFDGIRIDTVKHIRKDFWTGYAEAAGVFATGEVFNGDPAYVGPYQKYLPSLINYPMYYALNDVFVSKSKGFSRISEMLGSNRNAFEDTSVLTTFVDNHDNPRFLNSQSDKALFKNALTYVLLGEGIPIVYYGSEQGFSGGADPANREVLWTTNYDTSSDLYQFIKTVNSVRMKSNKAVYMDIYVGDNAYAFKHGDALVVLNNYGSGSTNQVSFSVSGKFDSGASLMDIVSNITTTVSSDGTVTFNLKDGLPAIFTSAGATSPGGSSGSVEVTFDVYATTVYGQNIYITGDVSELGNWTPANGVALSSANYPTWSATIALPADTTIQYKYVNIDGSTVIWEDAISNREITTPASGTYTEKDTWDES

SEQ ID NO: 122 - protein, 481 aa, Bacillus licheniformis
VNGTLMQYFEWYTPNDGQHWKRLQNDAEHLSDIGITAVWIPPAYKGTSQADVGYGAYDLYDLGEFHQKGTVRTKYGTKGELQSAIKSLHSRDINVYGDVVINHKGGADATEDVTAVEVDPADRNRVISGEHLIKAWTHFHFPGRGSTYSDFKWYWYHFDGTDWDESRKLNRIYKFQGKTWDWEVSNEFGNYDYLMYADIDYDHPDVVAEIKRWGTWYANELQLDGFRLDAVKHIKFSFLRDWVNHVREKTGKEMFTVAEYWSNDLGALENYLNKTNFNHSVFDVPLHYQFHAASTQGGGYDMRKLLNGTVVSKHPLKSVTFVDNHDTQPGQSLESTVQTWFKPLAYAFILTRESGYPQVFYGDMYGTKGDSQREIPALKHKIEPILKARKQYAYGAQHDYFDHHDIVGWTREGDSSVANSGLAALITDGPGGAKRMYVGRQNAGETWHDITGNRSEPVVINSEGWGEFHVNGGSVSIYVQR

SEQ ID NO: 123 - protein, 484 aa, Aspergillus niger
LSAAEWRTQSIYFLLTDRFGRTDNSTTATCDTGDQIYCGGSWQGIINHLDYIQGMGFTAIWISPITEQLPQDTADGEAYHGYWQQKIYDVNSNFGTADDLKSLSDALHARGMYLMVDVVPNHMGYAGNGNDVDYSVFDPFDSSSYFHPYCLITDWDNLTMVQDCWEGDTIVSLPDLNTTETAVRTIWYDWVADLVSNYSVDGLRIDSVLEVEPDFFPGYQEAAGVYCVGEVDNGNPALDCPYQKVLDGVLNYPIYWQLLYAFESSSGSISNLYNMIKSVASDCSDPTLLGNFIENHDNPRFASYTSDYSQAKNVLSYIFLSDGIPIVYAGEEQHYSGGKVPYNREATWLSGYDTSAELYTWIATTNAIRKLAISADSAYITYANDAFYTDSNTIAMRKGTSGSQVITVLSNKGSSGSSYTLTLSGSGYTSGTKLIEAYTCTSVTVDSSGDIPVPMASGLPRVLLPASVVDSSSLCGGSGRLYVE

SEQ ID NO: 124 - protein, 586 aa, Aspergillus tamarii
ATPADWRSQSIYFLLTDRFARTDGSTTAACNTEDRKYCGGTWQGIIDKLDYIQGMGFTAIWITPVTGQLPQHTAYGDAYHGYWQQDIYSLNENYGTADDLKALSSALHERGMYLMVDVVANHMGYDGAGASVDYSVFKPFNSQEYFHSFCLIQNYEDQTQVENCWLGDNTVSLPDLDTTKDEVKNEWYDWVGTLVSNYSIDGLRVDTVKHVQKDFWPGYNKAAGVYCIGEVLDGDPAYTCPYQDVMDGVLNYPIYYPLLNAFKSTSGSMNDLYNMINTVKSDCPDSTLLGTFVENHDNPRFASYTNDIALAKNVAAFIILNDGIPIIYAGQEQHYAGGNDPANREATWLSGYATDSELYKLIASANAIRSHAISKDTGFVTYKNWPIYKDDTTIAMRKGTDGSQVVTILSNKGASGDSYTLSLGDTGYKAGQQLTEVIGCTTVTVGSDGKVPVPMAGGLPRVLYPTEKLADSKICSSSGATSPGGSSGSVEVTFDVYATTVYGQNIYITGDVSELGNWTPANGVALSSANYPTWSATIALPADTTIQYKYVNIDGSTVIWEDAISNREITTPASGTYTEKDTWDES

SEQ ID NO: 125 - protein, 603 aa, Acidomyces richmondensis
LTPAEWRAQSIYQVLTDRFALTNGSTTAPCNLNEYCGGTWQGIINKLDYIQGMGFTAIWISPVVENIPASDNTADGESYHGYWAQRIYEVNPNFGSAADLEALSEAIHARGMYLMVDIVTNHMGYDGCGTCVDYSVFDPFDNQSYFHPFCLINYNNATSIQVCWEGDNIVSLPDLRTEDSDVLGMWETWITQLVANYSIDGLRVDSMQQVDQAFWQPFMSAAGDLYAVGEVFNGDPTYTCPYQQYLPGVLNYPAYYWITQAFESTSGSIGNLVNGINEMKNDCLDTTLLGSFLENHDNPRFPSYTSDYSLDKNAIAFAMLQDGIPIVYEGQEQHYSGGSVPNNREDIWSSGYSTTSELYTFIKIINAIRTQALTKDSSYLTYKAYPVYSDSQTIAMRKGETYPIISVFTNSGASGSAYSITLSSSDTGFSENQSITELLTCTVSTTDSGGNLVVNISSGLPRVYYPTSAISGSTVCAESTSTLTISSPISTSTSDCTTASSVAVTFDETVTTTYGETIKLSGSISQLGDWNTQDAILLSAADYKSTDNVWFVTINLPAGIVFQYKYINVDSDGDVTWEADPNHTYTVSATCATAATIHDTWQN

SEQ ID NO: 126 - protein, 588 aa, Aspergillus bombycis
ATPADWRSQSIYFLLTDRFARTDGSTTATCNTEDRKYCGGTWQGIIDKLDYIQGMGFTAIWITPVTGQLPQDTAYGEAYHGYWQQDIYALNENHGTADDLKALSSALHERGMYLMVDVVANHMGYDGAGASVDYSVFNPFSSQDYFHSFCLIENYDDQTQSENCWLGDNSVSLPDLDTTKDEVKNEWYEWVGNLVSNYSIDGLRVDTVKHVQKDFWPGYNEAAGVYCIGEVLNGDPAYTCPYQDVMDGVLNYPIYYPLLNAFKSTSGSMNDLYNMINTVKSDCPDSTLLGTFVENHDNPRFASYTNDIALAKNVAAFIILNDGIPIIYAGQEQHYAGGNDPANREATWLSGYSTDSEIYKLIASANAIRNHAVSTDTGFVTYKNWPIYKDDTTIAMRKGTDGSQIVTILSNKGASGDAYTLSLGNTGYTAGQQLTEVIGCTTLTVGSDGNVPVPMAGGLPRVLYPTEKLGDSKICSSSGRGATSPGGSSGSVEVTFDVYATTVYGQNIYITGDVSELGNWTPANGVALSSANYPTWSATIALPADTTIQYKYVNIDGSTVIWEDAISNREITTPASGTYTEKDTWDES

SEQ ID NO: 127 - protein, 570 aa, Alternaria sp.
ADTSAWKSRSIYFVLTDRIARSSSDTGGGSCSNLGNYCGGTFKGLESKLDYIKNLGFDAIWITPVVANSAGGYHGYWAQDLYAVNSNYGTAADLKSLVNTAHSKGIYVMVDVVANHMGQGAISGNRPEPLNQDSSYHSACDINYSSQTSIEQCRIANLPDLNTQSSQIRSLLNTWISWLVNEYSFDGVRIDTVKHVEKDFWPGFASAAGVYSIGEVWDGNPTYLAEYARLMPGLLNYATYYPMNNFYQQKGSSQALVDMMNTVRDTFPDPSALGTFLDNHDNNRWLNQKNDVTLLKNALAFVILSRGIPIVYYGTEQGYAGGADPANREDLWRSSFNTNADLYQAIKKLNAARTSAGGLAGNDHTHLYVSSNAYAWSRANGNLVVLTTNAGSGSNAQHCFNTQKANGRWTNVYGNGATVTADGSGNICVNVANGEPVVLLVSTATPTSATPTSNPSPTTLLTTSTACPTSVSVSFTHRVTTVFGDTIKITGNTAQLGNWNPSNGVALSAASYTSSNPIWTLTLPLPAGSAIQYKFVKVSSGGTVTWESDPNRSYSVPGCQASASVSSQWQ

SEQ ID NO: 128 - protein, 551 aa, Rhizopus microsporus
SPITIRSQNSNDWSSRVIYQLLTDRFAKTVDDQSPCSDLGNYCGGSFQGIINHLDYIAGMGFDAIWISPIPQNAQGGYHGYWATNFSAINSNFGSSNDLKKLVQAAHAKNMYVMLDVVANHVGTPSTPNNYNGYTFNQGSYYHSYCDINYNDQTSVEQCWLSGLPDLNTENDYVVNTLYSTVSNWISEYGFDGIRIDTVKHVRKDFWDGYVKAAGVFATGEVLHGSVSYVAPYQSHVPSLINYPLYYPIYDVFTKAATMTRLKSGYNDIQSGGFSNLNLLLNFIDNHDNPRLLSKADQSLVKNALTYSMLIQGIPVVYYGTEQSYKGGNDPNNREPLWTSGYSSSSEMYQFIKQVIQIRKGSNATVTMDIDQADNVYVFQRGNYLAVVNNYGQGSTNSVTVKSGSFADGTVLKDVFSGATATVKNKSITFQLQNGNPAVFSPQGATSPGGSSGSVEVTFDVYATTVYGQNIYITGDVSELGNWTPANGVALSSANYPTWSATIALPADTTIQYKYVNIDGSTVIWEDAISNREITTPASGTYTEKDTWDES

SEQ ID NO: 129 - protein, 565 aa, Syncephalastrum racemosum
VPLSIIDKRAGVTTLSKRAAADDWKSRSIYQIVTDRFARSDGSTSGCGDLSNYCGGDYKGIQNQLDYIAGMGFDAIWISPIPENTDGGYHGYWAKNFEALNTNFGSADDLKALVTAAHGKGMYVMLDVVANHAGPTSGGDYSGFTFDSASNYHAQCDIDYENQTSIEQCWVADNLPDINTEDDTIVSKLHSIVSDWVTTYDFDGIRIDTVKHIRKDFWSGYEEAAGVFATGEVFDGDAAYVGPYQDQLSSLINYPLYYAIRDVFTAGSGFSRISDMLSSINSNFKDPSVLTTFVDNQDNARFLSVKSDTSLYKNALAFTILTEGIPVVYYGTEQGFKGGNDPNNREVLWTSNYDTSSDLYKFIKIVNDQVRQKSNKTVKLNVDVGTNTYAFTHGKNLIVVNNYGSGSTASVTVKVGDSIADGTKLVDAVSNITATVSGGSITFSLNNGLPALFVPSSGATSPGGSSGSVEVTFDVYATTVYGQNIYITGDVSELGNWTPANGVALSSANYPTWSATIALPADTTIQYKYVNIDGSTVIWEDAISNREITTPASGTYTEKDTWDES

SEQ ID NO: 130 - protein, 583 aa, Rhizomucor pusillus
ATSDDWKGKAIYQLLTDRFGRADDSTSNCSNLSNYCGGTYEGITKHLDYISGMGFDAIWISPIPKNSDGGYHGYWATDFYQLNSNFGDESQLKALIQAAHERDMYVMLDVVANHAGPTSNGYSGYTFDDASLYHPKCTIDYNNQTSIEQCWVADELPDIDTENSDNVAILNDIVSGWVGNYSFDGIRIDTVKHIRKDFWTGYAEAAGVFATGEVFNGDPAYVGPYQKYLPSLINYPMYYALNDVFVSKSKGFSRISEMLGSNRNAFEDTSVLTTFVDNHDNPRFLNSQSDKALFKNALTYVLLGEGIPIVYYGSEQGFSGGADPANREVLWTTNYDTSSDLYQFIKTVNSVRMKSNKAVYMDIYVGDNAYAFKHGDALVVLNNYGSGSTNQVSFSVSGKFDSGASLMDIVSNITTTVSSDGTVTFNLKDGLPAIFTSATGGTTTTATPTGSGSVTSTSKTTATASKTSTSTSSTSCTTPTAVAVTFDLTATTTYGENIYLVGSISQLGDWETSDGIALSADKYTSSDPLWYVTVTLPAGESFEYKFIRIESDDSVEWESDPNREYTVPQACGTSTATVTDTWR

SEQ ID NO: 131 - protein, 553 aa, Dichotomocladium hesseltinei
QPVNITKRASAADWRSRAIYQVLTDRFARTDGSTSGCSNLSNYCGGTFKGITNKLDYIANLGFDAIWISPIPTNSPGGYHGYWATDFYGINSNFGSSNDLKELVNAAHAKGMYVMLDVVANHAGPTSNGDYSGYTFGSSGLYHNRCSINYNDQRSIEQCWVADDLPDINTENNDNVNKPNNIVSTWVKTYGFDAIRIDTVKHVRKDFWPGYTSAAGVFATGEVFDGNPSYVADYQNYMESLINYPLYYALNDVFASGYSFSRLSNQRVANYHAFKDVSVLPIFIDNHDNPRFLNKKNDIAQFKNALTYVLLGEGIPVVYYGSEQAYAGGADPANREALWSSGFSTNSDMYQFIAKLNRVRQKSNKSVYMDLDVQNNVYAFMHGKSLVVLNNFGNGASRQVTVNVGAQVASNTRLTDVVSGTSVTVSGSSVTFTINNGLPAVFTVSGATSPGGSSGSVEVTFDVYATTVYGQNIYITGDVSELGNWTPANGVALSSANYPTWSATIALPADTTIQYKYVNIDGSTVIWEDAISNREITTPASGTYTEKDTWDES

SEQ ID NO: 132 - protein, 552 aa, Lichtheimia ramosa
RPFVKRATADDWRDRAIYQILTDRFARSDGSTDNCSDLSNYCGGNYQGIIQQLDYIEGMGFDAIWISPIPANADGGYHGYWATDFESLNDHFGSQDDLKALVDAAHERGMYVMLDVVANHAGPTNNGDYSGYTFGSSDLYHPQCSIDYSNQNSIEQCWVADNLPDIDTENDSNVNKLHDIVSTWVSTYGFDGIRIDTVKHVRKDFWPGYASAAGVFATGEVYDGDQTYVGAYQDYLDSLLNYPLYYALNDVFASGQGFQRLSNQRNAIMSAFKDVSVLTSFVDNHDVARFLSTKNDQALFKNALAFVLLGETIPVVYYGSEQGFAGGADPANREALWSSGYDTSSDLYQFIATINNNVRQKSGKKVYMDLDVQDNVYAFMHGDALVVLNNYGSGASNQVSVNVGAQVAESTSFTDAISGTSITVSSGSVTFTLDNGNPAIFVPAGATSPGGSSGSVEVTFDVYATTVYGQNIYITGDVSELGNWTPANGVALSSANYPTWSATIALPADTTIQYKYVNIDGSTVIWEDAISNREITTPASGTYTEKDTWDES

SEQ ID NO: 133 - protein, 587 aa, Penicillium aethiopicum
ARTADWKPRSIYQTMTDRFARTDGSTTSPCNTKAGLYCGGTWRGTIDHLDYIQGMGFDAVMISPIIENIEGRVDYGEAYHGYWPLNLDNLNSHFGTHQDLLDLSDALHSRGMYFMMDTVINNMAYITNGSDPATDIDYSVFTPFNNADYFHPYCTMNWSVPAIAQRCNTGDDTVALPDLFTEHEDVQQLLIKWANKAIKTYSIDGLRIDAAKHVNPDFLRKFSDGVDIFMTGEVLEGSVSIMEDYQSNYINSLPNYPIYFEILSAFTNGNTSQLAIAVENMRVAIPDVNAMASFSENHDKPRIASYNDDMSIAKNVLVFTMLFDGIPMIYQGQEQHLKGDGVPHNREAIWLSKYDTEAELYKLIAKLNRIRNHAGYLGSDYFEDATHPIYQGSSELAFTKGVQGRQVVMVLSNQPSTSGRYALDLAVSYNAGTELMDVLNCNNYTVDNQGVLRVDMDKGEPRVFFPRKYMEGSGLCGYSGATSPGGSSGSVEVTFDVYATTVYGQNIYITGDVSELGNWTPANGVALSSANYPTWSATIALPADTTIQYKYVNIDGSTVIWEDAISNREITTPASGTYTEKDTWDES

SEQ ID NO: 134 - protein, 597 aa, Subulispora sp.
LTPAEWGSQSIYQVLTDRFALTDGSTTASCDLNTYCGGTWLGIQNHLDYIQGMGFTAIWISPIVTNIAGDSVDGDSYHGYWAQDITTVNSAFGTEQDLINLSAALHERGMYLMVDVVNNHMGYLGCGTCVDYSEYTPFNEESYYHPYCPTDYSNLTSIQVCWEGDNIVSLPDLRTEDSDVRSMWYDWITPLVAKYSIDGLRMDSAEHVEKSFWPGWVSASGVYNVGEVDEGDPTIFPDWLNYIDGTLNYPAYYWITQAFQSTSGSISNLVTGVNQLKASMKTSTFGSFLENHDQPRFPSLTSDTDLAKNAIAFAMLADGVPIVYYGQEQGYSGGGVPNDREPLWTSGYSTTSAGYTFIKTINAVRHLAVTQDTAYVAYQAYPIYSDSRVIAMKKSSVLAVFSNIGSSGSGYSITLPAGAFAASQALTDAVSCQTYTADASGGLTFTFGQAPSVFYATASLAGSGLCGTTGTGGSTGTTTASETGGSSPTSTACASVPVTFNEKVTTVVGETIKISGSVAALGDWATGSAVALSAASYTSSNPQWDVTISFAPGTVIEYKYINVASSGAVTWEADPNHTYTVPASCATAAVVSDTWQT

SEQ ID NO: 135 - protein, 601 aa, Trichoderma paraviridescens
LTAAQWRSQSIYQVLTDRFSQTNGATNSACNAGNQVYCGGTWQGIIKNLDYIKSMGFTAIWISPVVENLAGNSADGEAYHGYWAQDIYQVNTNFGSAADLRALSEALHNAGMYLMVDIVTNHMGYLGCGTCVQYNTFNPFNSQSYYHPFCLINFNSSNMTQIQNCWEGDNTVSLPDLATENANVLSMWQTWITQLVANYTIDGLRMDSCFELNYGYFEPFQSSANVYIVGEVDNGDPAIVCPYQKNYGLNTLNYPAYYWITQAFQSTSGSISNLVNGLNTMKSECSDTTLLGSFMENHDNPRFPSLTSDISLAKNAIAFTMLADGIPIIYEGQEQHLNGGGVPNNREAIWLSGYSTSAVLYTHIKALNQIRSQAIKQNSAYVTTQAAVTYSDSSTIVTRKGSTGSQIVGVFSNKGANGNSYTLTLPSADTGFTSNEQVVEILSCTAYTTDSSGNLAVAMAGGLPRVFYARSSLSGSGICPNLGSGGGTPTSTPPTSCTAIPVTFDEKVTTTFGQTIKIAGDISALGNWNTANAVTLSAANYTSSNPLWAITLNLAPGQVVEYKYINVAQNGGVTWEADPNHTYTVPSACTAQPTVANTWQG

SEQ ID NO: 136 - protein, 598 aa, Byssoascus striatosporus
LSADDWRAQSIYQLLTDRFALTNGSTTAPCDTEEQIYCGGSWQGIIDKLDYIQGMGFTAIWISPVVENLSGDSADGEAYHGYWAQNVYEVNPNFGATSDLVALSQVVHDKGMYLMLDVVTNHMGYLGCGTCVDYSVFNPFNEESYYHPFCLIDYDNTTSIEVCWEGDNIVSLPDLRTEDSDVLSTWESWVTELVSNYTVDGIRLDSTEELDQAFLPPFESAAGVYIVGEVDNGDPAVVCPYQEYVSGVLNYPAYYWITQAFESTSGSIGNLVNGINTMKSDCSDTSLLGSFLENHDQPRFASLTSDISLAKNAIAFSMLQDGIPIVYAGEEQHYSGGAVPNDREALWLSGYPTSSTLYTWITSLNQIRSHAIATNSSYLTYNAYPVYSDDSTIVMRKGFADNQIVSVYTNQGADATAYTLDLPSTDTGFTASQSLVEIGGCTTTATDDSGNLAVAMASGLPRIYYPAAGLSGSGVCGQLGSGGGTPTSTPPTSCTAIPVTFDEKVTTTFGQTIKIAGDISALGNWNTANAVTLSAANYTSSNPLWAITLNLAPGQVVEYKYINVAQNGGVTWEADPNHTYTVPSACTAQPTVANTWQG

SEQ ID NO: 137 - protein, 615 aa, Aspergillus brasiliensis
LSAAEWRTQSIYFLLTDRFGRTDNSTTATCNTGDQIYCGGSWQGIINHLDYIQGMGFTAIWISPITEQLPQDTSDGEAYHGYWQQKIYDVNSNFGTADDLKSLSDALHARGMYLMIDVVPNHMGYAGSGNDVDYSVFDPFDSSSYFHPYCLITDWDNLTMVQDCWEGDTIVSLPDLNTTETVVRTIWYDWVADLVSNYSVDGLRIDSVLEVEPDFFPGYQEAAGVYCVGEVDNGNPALDCPYQDYLDGVLNYPIYWQLLYAFESSSGSISDLYNMIKSVASDCSDPTLLGNFIENHDNPRFAYYTSDYSQAKNVLSYIFLSDGIPIVYAGEEQHYSGGDVPYNREATWLSGYDTSAELYTWIATTNAIRKLAIAADSSYITYANDPIYTDSNTIAMRKGTSGSQVITVLSNKGSSGSSYTLTLSGSGYTSGTKLIEAYTCTSVTVDSNGDIPVPMASGLPRVLLPASVVDDSSLCGGSGSSTSTTTSTATATTTSKTSTTSSSSSSSSCTASATAIPITFEELVTTTYGEEIYLSGSISQLGDWDTSDAVKLSADDYTSSNPEWSVTVTLPVGTTFEYKFIKVESGGSVTWESDPNREYTVPECGSGETVVDTWR

SEQ ID NO: 138 - protein, 604 aa, Penicillium subspinulosum
ALSAEWRTQSIYFLLTDRFGRTDNSTTATCDTGDQIYCGGSWQGVINHLDYIQGMGFTAIWISPITEQLSGDTSDGEAYHGYWQQKIYNVNSNFGTADDLVALSDALHARDMYLMLDVVPNHMGYDGDGDDVDYSVFDPFDSSSYFHPYCLITDYDDIEMVQDCWEGDTIVSLPDLNTTETVVQDIWYAWVADLVANYSVDGLRIDSVLEVQPAFFPAYQSAAGVYCVGEVDNGDPTLDCPYQDYLDGILNYPIYYQLLYAFESSSGSISDLYDMINSVASDCSDPTLLGNFIENHDNPRFAYYTSDYSQAKNVASFIFLSDGIPIVYAGQEQHYSGGDVPYDREATWLSGYSTTAELYTWIATTNSIRKLAISLDDDYITYVNDPFYTDENTIAMRKGTSGLQVITVLSNLGADGSAYTLTLSGSGYDSGTDLIEVYTCTSVTVDSSGDIAVPMESGLPRVFLPESSIKDSDLCSGTTTTTTSTAATATATSTSTCTAATEVSIIFEELVTTTYGEEIYLSGSISELGSWDTSDALELSAANYTSSNPEWYLEVTLPVGTSFEYKFIMIESDGTVVWESDPNRSYTVPSACSGAVETVVDTWR

SEQ ID NO: 139 - protein, 606 aa, Penicillium antarcticum
LTPAEWRSQSIYFMLTDRFGRSDNSTTAACNVSDRTYCGGTWQGIINHLDYIQGMGFTAIWITPVTEQLPQDTGDGEAYHGYWQQNIYEVDSNLGTAADLLALSEALHARGMYLMVDVVANHMGYAGAGSSVEYSVFHPFSSSSYFHSYCLISNYDDQSNVEDCWLGDTIVSLPDVDTTQTAVQTLWYDWIGDLVSNYSIDGLRIDTVKHVQKSFWPGYNDAAGVYCVGEIFDGDPAYTCDYQNYMDGVLNYPIYYQLLYAFQSSSGSISDLYDMINSVKSDCADPTLLGNFIENHDNPRFASYTSDYSQAKNVISFLFLSDGIPIIYSGQEQHYSGGADPANREATWLSGYSTTAELYKYIATTNRIRKAAVSADSSYITTKNVPFYQDSHTLAMKKGSSASPVITVLSNYGSSGSSYTLSLSGSGYSSGTNLMEMYTCTSVTVDSSGNIAVPMASGLPRVLMLASSASSICASSTTTSTATVATQTTTLTTTGTSCTQATVLPVLFKELVTTTYGQNVYISGSISQLGSWDTSSAIALSASSYNSSNPLWQVAITLPVGTSFQYKFLEKTTGSTTIQWESDPNRSYTVPTGCVGTTATAIATWR

SEQ ID NO: 140 - protein, 609 aa, Penicillium coprophilum
LTPAEWRSQSIYFLLTDRFGRTDNSVTANCNVNDRVYCGGTWQGIINQLDYIQGMGFTAIWITPVTKQLSQNTGDGTSYHGYWQQDIYNVNPNHGTSDDLLALSKALHARGMYLMVDVVANHMGYAGAGNNVDYSVFTPFNSASYFHSYCLISNYNDQSNVENCWLGDTTVSLPDLDTTQSSVQTLWNNWISDLVSKYSIDGLRVDTVKHVQKSFWPAFNRAAGVYSVGEVFDGSPSYTCDYQKYMDGVLNYPMYYPLLRAFQSTSGSISDLYNMIGTLSSTCADSTLLGNFIENHDNPRFPSYTSDYSQAKNVLSFLFLSDGIPIVYSGQEQHYSGGSDPANREALWLSKYSTTAELYKYIATTNKIRKAAVAADSSYITSKNVAFYQDSHTLAMKKGSGSSPVITVLSNAGSSGSSYTLYLSGSGYSSGTQLMELYTCTSVTVDSSNKIAVPMASGLPRVFVLASSVSNSGLCGSSTPTTTATTATTATQTTTATTTAGGCTQATALPVLFKELVTTSYGQDIYISGSISQLGTWDTSKAVALSADSYTSSNPLWQATITLPVGTTFQYKFIKKANGAITWESDPNRSYTVPTGCSGSTATVTASWK

SEQ ID NO: 141 - protein, 602 aa, Penicillium olsonii
LTPAEWRSQSIYFLLTDRFGRDDNSTTATCNTGDRTYCGGTWQGIINQLDYIQGMGFTAIWITPVTEQLSANTGYGTAYHGYWQQDIYEVNPNHGSSADLKALSAALHARGMYLMVDVVANHMGYNGIGSSVDYSVFNPFSSSSYFHSYCLISNYNDQSNVENCWLGDTTVSLPDLDTTQTAVQTIWNEWITDLVSNYSIDGLRIDTVKHVQKSFWPGFNDAAGVYSVGEIFDGNPSYTCDYQNYLDGVLNYPIYYPLLYAFQSTSGSISDLYNMINTVASDCADSTLLGNFIENHDNPRFPSYTGDYSQAKNVISYLFLSDGIPIIYSGQEQHYSGASDPANREALWLSGYSTTAELYKWIATTNKIRKLAVSADSSYITSKNSPFYQDSHTLGMKKGSVITILSNNGASGSSYTLSLSGSGYSSGTKLMELYTCTSITVDSSGNIPVPMVSGLPRALIPASSIGSNGLCGSTTSPTTTAATQTTTATTTGTCTQATALPVLFKELVTTSYGQNVYISGSISQLGNWDASSAIALSASSYTSSNPLWQVTITLPVGTKFEYKFIEKSSGSATATWESDPNRSYTVPTGCAGTTATVTATWR

SEQ ID NO: 142 - protein, 621 aa, Penicillium vasconiae
LTAAEWRTQSIYFLLTDRFGRTDNSTTATCSVSDRIYCGGSWQGIINHLDYIQGMGFTAIWITPVTEQLSQDTGDGEAYHGYWQQEIYNVNTNYGTAADLLALSKALHSRGMYLMVDVVANHMGYDGAGNTVDYSVFNPFDSSSYFHSYCEISDYSNQTNVEDCWLGDTTVSLPDLDTTLSSVQTIWYNWVTELVSNYSIDGLRIDTVKHVQKSFWPGYNSAAGVYCVGEVFDGDPAYTCPYQSYLDGVLNYPIYYQLLYAFESTSGSISSLYNMINSVASDCSDPTLLGNFIENHDNPRFASYTSDYSQAKNVISFIFFSDGIPIVYAGQEQHYSGGSDPANREATWLSGYDTTATLYKYITSTNKIRSLAISKDTAYITSKNNAFYTDSNTIAMKKGSSGSQVITVLSNRGSSGSSYTLTLSGSGYSSGTQLMEMYTCTAVTVDSSGNIAVPMASGLPRIYMLASSACSICSSSCSTTTTTSTTSTSTTTASTLKTTTSTTSATSTTSTSCTQATALPVLFKEIVTTSYGQNIYISGSISQLGSWDTSNAVALSADQYTSSNNLWYVVVTIPVGTSFEYKFIEETSGSSTITWESDPNRSYTVPTGCAGSTATVTATWR

SEQ ID NO: 143 - protein, 615 aa, Penicillium sp.
LTAAEWRSQSIYFLLTDRFGRTDNSTTATCNVSDRIYCGGSWQGIINHLDYIQGMGFTAIWITPVTEQLSQDTGDGEAYHGYWQQEIYNVNTNYGTAADLLALSKALHSRGMYLMVDVVANHMGYDGAGNTVDYSVFNPFDSSSYFHSYCEITDYSNQTNVEDCWLGDTTVSLPDLNTTLSSVQTIWYDWVAALVSNYSIDGLRIDTVKHVQESFWPEYNSAAGVYCVGEVFDGDPAYTCPYQNYLDGVLNYPIYYQLLYAFESTSGSISDLYNMINSVASDCSDPTLLGNFIENHDNPRFASYTSDYSQAKNVLSFIFFSDGIPIVYAGQEQHYSGGSDPANREATWLSGYDTSAELYTWITSTNKIRSLAVSKDTAYITSKNDAFYTDSNTIAMKKGSGGSQVVTVLSNRGSSGSSYTLTLSGSGYSSGTKLMEMYTCTAVTVDSSGNIAVPMASGLPRVYMLASSACSICSSACSTTTTSSTTSTATTTSTTLKTTTTTTSTSCTQATALPVLFKEIVTTSYGQNIYISGSISELGDWDTSNAVALSADQYTSSNNLWYVVVTIPVGTSFEYKFIEETSGSSSITWESDPNRSYTVPTGCAGSTATVTATWR

SEQ ID NO: 144 - protein, 606 aa, Heterocephalum aurantiacum
LTAAEWRQQSIYFLLTDRFARTDGSTTAACNLSQRAYCGGSWQGIINHLDYIQGMGFTAIWITPVTKQIEASTSDGTAYHGYWQQDIYNINSHYGTADDLRALSSALHSRGMYLMIDVVANHMGYPGAGTSVDYSIFTPFGSSSYFHSYCQITDYDNQSNVENCWLGDNVVSLPDLNTQNSNVRNLWYDWVEELVANYSVDGLRVDTVKHVEKDFWPSYNAAAGVYCVGEVFHGDPAYTCPYQNYMDGVLNYPIYYQLLYAFQSSSGSITDLYNMINSVASDCKDPTTLGNFIENHDNPRFPSYTSDMSQAKSVIAFLFLSDGIPIIYAGQEQHYSGGADPNNREAIWLSGYSTSSTLYQFISSTNSIRKLAISKDSSYLTSRNNPFYTDSNTIAMRKGSSGSQVITVLSNKGSSGNSYTLTLTNHGYSSGAQLTELYTCSSIQVASSGGLAVPMASGLPRVLVPSSWIQGSGLCGGGSTTTTTTATTTTTTTTSTSSCAAATSLAVVFNELVTTYYGENIFIAGSISQLGSWDTGKSVALSASQYTSSNPLWTATVSLPVGTSFQYKFIKKEPDGQVVWESDPNRSYTVPAGCAGTTQTVNTSWR

SEQ ID NO: 145 - protein, 602 aa, Neosartorya massa
LTPAEWRSQSIYFLLTDRFGREDNSTTAACDVTQRLYCGGSWQGIINHLDYIQGMGFTAIWITPVTEQFYEDTGDGTSYHGYWQQNIYEVNYNYGTAQDLKNLADALHARGMYLMVDVVANHMGYDGAGNTVDYSVFTPFDSSSYFHPYCLISDYSNQTNVEDCWLGDTTVSLPDLDTTDTTVRTIWYDWVKGLVANYSIDGLRIDTVKHVEKDFWPGYNDAAGVYCVGEVFSGDPTYTCPYQNYLDGVLNYPIYYQLLYAFESTSGSISNLYDMINSVASDCADPTLLGNFIENHDNPRFASYTSDYSQAKNVISFIFFSDGIPIVYAGQEQHYSGGADPANREAVWLSGYSTSATLYSWIASTNRIRKLAISKDAAYITSKNNPFYYDSNTLAMRKGSIAGAQVITVLSNKGSSGSSYTLSLSGTGYSAGASLVEMYTCTTLTVDSSGNLPVPMASGLPRVLVPSSWVSGSGLCGSGSTTTTTTTATATTTACTSATALPIVFEEVVTTTYGENVYLTGSISQLGNWDTSSAIALSASKYTSSNPEWYVTVTLPVGTSFQYKFFKKESDGSIVWESDPNRSYTVPTGCAGTTVTVSDTWR

SEQ ID NO: 146 - protein, 588 aa, Penicillium janthinellum
ATPAQWRSQSIYFMLTDRFARTDGSTTAPCDTSQRAYCGGTWQGIIDKLDYIQGMGFTAIWITPVTGQLDGDTGDGTAYHGYWQQDIYSLNSNYGTASDLKALASALHARGMYLMVDVVANHMGYNGAGNTVDYSVFDAFNSNQYFHSYCEVTNYSNQTNVEDCWLGDTTVSLPDLNTELSSVQSIWYNWVGSLVSNYSIDGLRVDTVKHVQKDFWPGYNKAAGVYCVGEVFDGDASYTCPYQEVMDGVLNYPMYYPLLRAFQSTSGSMSDLYNMINTVKSTCSDSTLLGTFVENHDNPRFASYTNDMSLAKNVAAFTIMADGIPIIYAGQEQHYSGGSDPANREAVWLSGYNTDSALYKLIAKVNAIRSYAISQSASYVTYKNYPIYQDASTLAMRKGSSGTQTITVLSNRGASGSQYTLSLGNTGYSTGTTLTEIITCAKITVDSSGNVPVPMASGEPRILYPSSSIKGSAICASSGRGATSPGGSSGSVEVTFDVYATTVYGQNIYITGDVSELGNWTPANGVALSSANYPTWSATIALPADTTIQYKYVNIDGSTVIWEDAISNREITTPASGTYTEKDTWDES

SEQ ID NO: 147 - protein, 589 aa, Aspergillus brasiliensis
ATPAEWRSQSIYFLLTDRFARTDNSTTASCDLSARQYCGGSWQGIINQLDYIQGMGFTAIWVTPVTAQIPQDTGYGQAYHGYWQQDAYALNSHYGTADDLKALATALHSRGMYLMVDVVANHMGHNGTGSSVEYSVYNPFNAKKYFHNLCWISNYDNQTNVEDCWLGDNTVALPDLDTTRTDVKNMWYDWVKSLVSNYSVDGLRVDTVKNVQKNFWPGYNNASGVYCIGEVFDGDASYTCPYQDDLDGVLNYPMYYPLLRAFKSTTGSISDLYNMINTVKSTCKDSTLLGTFIENHDNPRFANYTSDMSLAKNVATFTILADGIPIIYAGQEQHYSGGNDPYNREATWLSGYKTTSELYTHIAASNKIRTHAIKQDSGYLTYKNYPIYQDTSTLAMRKGYNGTQTITVLSNLGASGSSYTLSLPGTGYTAGQKITEIYTCTNLTVNSNGSVPVPMKSGLPRILYPTDKLVNGSSFCSSSGRGATSPGGSSGSVEVTFDVYATTVYGQNIYITGDVSELGNWTPANGVALSSANYPTWSATIALPADTTIQYKYVNIDGSTVIWEDAISNREITTPASGTYTEKDTWDES

SEQ ID NO: 148 - protein, 588 aa, Aspergillus westerdijkiae
ATPAQWRSQSIYFLLTDRFARDDGSTTATCNTEDRKYCGGTWQGIIDQLDYIQGMGFTAIWITPVTAQLTEDTKYGDAYHGYWQQDIYSLNENYGTADDLKALADALHERDMYLMVDVVANHMGYAGAGDSVDYSVFNPFNSQDYFHSFCLIQDYNDQTQSEDCWLGDNSVSLPDLDTTKSEVQDIWYDWVGGLVSNYSIDGLRIDTVKHVQKEFWPGYNDAAGVYCIGEILDGDASYTCPYQEVLDGVLNYPIYYPLLNAFKSTSGSISDLYNMINTVKSDCPDSTLMGTFIENHDNPRFASYTDDIALAKNVAAFTILADGIPIVYAGQEQHYAGGEDPANREATWLGKYNTDSELYKLIAASNAIRNHAISTDKEYVNYKNYPIYKDDSTIAMRKGFDGAQIITVLSNQGSSGSSYTLSLGDTGFSSGDKLTEIYTCTAVTVDSDGKVPVPMDGGAPRALFPTEKLSGSSLCSGSGRGATSPGGSSGSVEVTFDVYATTVYGQNIYITGDVSELGNWTPANGVALSSANYPTWSATIALPADTTIQYKYVNIDGSTVIWEDAISNREITTPASGTYTEKDTWDES

SEQ ID NO: 149 - protein, 476 aa, Hamigera avellanea
ATPADWRSRSIYFILTDRFARTDGSTTAECDTSARAYCGGTWRGIINKLDYIQNMGFTAIWITPVTAQLPGSTGHGSAYHGYWQQDIYSLEPNYGTADDLRALASALHERNMYLMVDVVANHMGWAGSGDSVDYSVFNPFDSADYFHPYCLISNYEDQTEVENCWLGDTNVALVDLDTTRSDVQNIWYEWVDSLVGNYSIDGLRIDTVRHVQKDFWPGFNDAAGVYSVGEVFSGDTAYTCPYQEVLDGVLNYPIYYPLLRAFQSTSGSINDLYNMINTVKSDCADSTLMGTFLENHDNPRFASYTSDVALAKNAIAFTILSDGIPIIYAGQEQHYSGGNDPANREAVWLSGYSTDSELYSFVAVTNQIRNYAISQDQGYVTWKNVPIYQDTSTLAMRKGTDGSQVITVLSNLGASGSSYTLTLGGSGYSSGQQLTEIFSCATVTVDSSGNIPVPMGSGQPKVFYPTAGLGGSGICQ

SEQ ID NO: 150 - protein, 586 aa, Hamigera avellanea
ATPADWRSRSIYFILTDRFARTDGSTTAECDTSARAYCGGTWRGIINKLDYIQNMGFTAIWITPVTAQLPGSTGHGSAYHGYWQQDIYSLEPNYGTADDLRALASALHERNMYLMVDVVANHMGWAGSGDSVDYSVFNPFDSADYFHPYCLISNYEDQTEVENCWLGDTNVALVDLDTTRSDVQNIWYEWVDSLVGNYSIDGLRIDTVRHVQKDFWPGFNDAAGVYSVGEVFSGDTAYTCPYQEVLDGVLNYPIYYPLLRAFQSTSGSINDLYNMINTVKSDCADSTLMGTFLENHDNPRFASYTSDVALAKNAIAFTILSDGIPIIYAGQEQHYSGGNDPANREAVWLSGYSTDSELYSFVAVTNQIRNYAISQDQGYVTWKNVPIYQDTSTLAMRKGTDGSQVITVLSNLGASGSSYTLTLGGSGYSSGQQLTEIFSCATVTVDSSGNIPVPMGSGQPKVFYPTAGLGGSGICQSSGATSPGGSSGSVEVTFDVYATTVYGQNIYITGDVSELGNWTPANGVALSSANYPTWSATIALPADTTIQYKYVNIDGSTVIWEDAISNREITTPASGTYTEKDTWDES

SEQ ID NO: 151 - protein, 576 aa, Meripilus giganteus
RPTVFDAGADAHSLHARAPSGSKDVIIQMFEWNWDSVAAECTNFIGPAGYGFVQVSPPQETIQGAQWWTDYQPVSYTLTGKRGDRSQFANMITTCHAAGVGVIVDTIWNHMAGVDSGTGTAGSSFTHYNYPGIYQNQDFHHCGLEPGDDIVNYDNAVEVQTCELVNLADLATDTEYVRGRLAQYGNDLLSLGADGLRLDASKHIPVGDIANILSRLSRSVYITQEVIFGAGEPITPNQYTGNGDVQEFRYTSALKDAFLSSGISNLQDFENRGWVPGSGANVFVVNHDTERNGASLNNNSPSNTYVTATIFSLAHPYGTPTILSSYDGFTNTDAGAPNNNVGTCSTSGGANGWLCQHRWTAIAGMVGFRNNVGSAALNNWQAPQSQQIAFGRGALGFVAINNADSAWSTTFTTSLPDGSYCDVISGKASGSSCTGSSFTVSGGKLTATVPARSAIAVHTGQKGSGGATPTSAPSTTPTSGTVSMTFAEQATTTFGENIFLVGSISQLGNWNPASAIALSSAAYPTWSVSVNIPAGTTFQYKFIRKETDGSVVWESDPNRQATAPASGTTTLTSSWR

SEQ ID NO: 152 - protein, 575 aa, Cerrena unicolor
RPLNASNALDARAPSGAKSVIIQMFEWTWDSVAAECTNFIGPAGYGFVQVSPPQETIQGDQWWTDYQPVSYILTSKRGTRDQFAAMIDTCHDAGVKVIVDTIWNHMAGVESGTGVAGSSFTHYNYPGIYQNQDFHHCGLESGDDIVNYDNAQEVQTCELVNLADLATETDYVRGRLAEYGNDLLSLGADGLRLDAAKHIAVGDLANIIGRLNSTPYITQEVIFGSGEPITPNQYTGNGDVQKFRYTSALKDAFLNGDISSLQDFENRGWVAGSGANVFVTNHDTERNGNSLNNNSPNNAYTLAMIFSLAHPYGTPSILSSYSGFTDTDAGAPNGGAGTCSGSGGSNGWLCQHRWTAVAGMVGFRNTVGSAALNNWVSPQSSQIAFGRGALGFVAINNGDSTWSTTFTTSLPDGTYCDVITGTSSSGSCTGSSFTVSGGTFTANVAARDAVAIHTGATGTGSGSGNTSTGSGGTTSDTVSVSFAETATTTFGENIFLVGSISQLGAWDPASAIALSSASYPTWTVTVTLPAGTTFEYKFIRKETDGSVVWESDPNRQATTPSSSDAATTTLSTSWR

SEQ ID NO: 153 - protein, 562 aa, Physalacria cryptomeriae
APFLELQVRAPSSTKQVIIQMFEWTWDSVAAECTDFIGPAGYGYVQVSPPAEHITGDQWWTDYQPVSYILTSKRGNRSQFANMVTTCHTAGVLVIADALFNHMAGIESGTGTAGSSFTHYDYPGIYQTQDFHHCGLTSGDDISDYSSQAQVQTCELVNLADLATDTEYVRAKLASYANDLISLGVNGLRLDAAKHIATDDIKNILSRLSSTVYITQEVIFGSGEPVTPSMYTQNGDVQEFRYTSTLQSAFSGGDISQLQNLDSKGWIAGTSANVFVANHDTERGGSSLNYKSSSNTYVTATIFSLAHPYGTPTILSSYEFSDTDAGSPNGGAGTCSTTGGANGWLCQHRWVAFSGMVGFHNNVGTASLTNWVSPQSNQIAFERSGKGFVAINNADSAWTATFTTSLAAGSYCDVITGTSNGSACSGTSYTVSGGSFSATVAARSAVAIHTGATGSGSGGGGGSTGSVAITFQETATTTLGENIFLVGSISQLRTWAPASAIALSSASYPTWSVTVSIPAGTTFEYKFIRKESDGSVVWESDPNRSATASSSASTQTILTSWR

SEQ ID NO: 154 - protein, 578 aa, Lenzites betulinus
RPASTVFHGAETRSLDARAPSGSKDVIIQMFEWTWDSVAAECTNFIGPAGYGFVQGSPPQEHIQGAQWWTDYQPVSYTLTSKRGDRTSFANMIQTCHTAGVGVIVDTLFNHMAGVDSGTGVAGSSFTHYNYPGIYQNQDFHHCGLEPGDDIVNYDNAVEVQTCELDNLADLATETEYVRGRLAQYGNDLLSLGADGMRLDAAKHIAVGDIANILSRLNRTVYITQEVIFGAGEPITPNQYTGNGDVQEFRYTSALQDAFLNSGIANLQVLENRGWVPGSGANVFVTNHDTERNGASLNNNSPSNTYVTAMIFSLAHPFGTPSILSSYSGFTDTDAGAPNGGVGTCSGSGGTNGWLCQHRWTAVAGMVGFRNQVGSAALGNWQSPQSQQIAFGRGALGFVAINNADSAWSATFTTSLPDGSYCDVISGQTSGSTCTGSSFTVSGGSLSATVPARSAIAVHTGQKGTGSGSGTGTGGGGSTGSGNVAVNFAETATTTFGENIFVVGSISQLGTWNTANAIALSSPSYPTWTVSISIPAGTTFQYKFIRKETDGSVVWESDPNRQATAPASGSTTLSTSWR

SEQ ID NO: 155 - protein, 571 aa, Trametes ljubarskyi
RPATFDAADARSVQPRAPSGSKDVIIQMFEWTWDSVAAECTNFIGPAGYGFVQGNPPQEHIQGDQWWTDYQPVSYILTSKRGDRTAFANMISTCHAAGVGVIVDTIFNHMSGVDSGTGVAGSSFTHYNYPGIYQNQDFHHCGLEPGDDIVNYDNAVEVQTCELENLADLATDTEYVRGRLAQYANDLLSLGADGLRLDAAKHIPTGDIANILSRLNRSVYITQEVIYGDGEPITPNQYTGNGDVQEFRYTTALKNAFLGGGISSLQSFDNLGWVPGTGANVFVTNHDTERNGNSLNNNSPSNTYVTAMIFSLAHPYGTPTILSSYSGFTNTDAGAPNGGTGTCSGSGGANGWLCQHRWTAVAGMVGFRNNVGSAALTNWQSPQSQQIAFGRGALGFVAINNADSAWSTTFTTSLPDGSYCDVVSGTSSNGGCTGSSFSVSGGSLTATVPARSAIAIHTGETGSGSNSGGGSGGSGTVTINFAETATTTFGENIFVVGSIPQLGSWNPANAIALSSASYPTWTVSVSVPAGTTFEYKFIRKETDGSVVWESDPNRSDTAPASGTQTITTSWR

SEQ ID NO: 156 - protein, 451 aa, Bacillus subtilis
GPAAASAETANKSNELTAPSIKSGTILHAWNWSFNTLKHNMKDIHDAGYTAIQTSPINQVKEGNQGDKSMSNWYWLYQPTSYQIGNRYLGTEQEFKEMCAAAEEYGIKVIVDAVINHTTFDYAAISNEVKSIPNWTHGNTQIKNWSDRWDVTQNSLLGLYDWNTQNTQVQSYLKRFLERALNDGADGFRFDAAKHIELPDDGSYGSQFWPNITNTSAEFQYGEILQDSASRDAAYANYMDVTASNYGHSIRSALKNRNLGVSNISHYAYDVSADKLVTWVESHDTYANDDEESTWMSDDDIRLGWAVIASRSGSTPLFFSRPEGGGNGVRFPGKSQIGDRGSALFEDQSITAVNRFHNVMAGQPEELSNPNGNNQIFMNQRGSHGVVLANAGSSSVSINTPTKLPDGRYDNKAGAGSFQVNDGKLTGTINARSVAVLYPDDIEIRCNTFFQ

SEQ ID NO: 157 - protein, 633 aa, Bacillus subtilis
GPAAASAETANKSNELTAPSIKSGTILHAWNWSFNTLKHNMKDIHDAGYTAIQTSPINQVKEGNQGDKSMSNWYWLYQPTSYQIGNRYLGTEQEFKEMCAAAEEYGIKVIVDAVINHTTSDYAAISNEVKSIPNWTHGNTQIKNWSDRWDVTQNSLLGLYDWNTQNTQVQSYLKRFLDRALNDGADGFRFDAAKHIELPDDGSYGSQFWPNITNTSAEFQYGEILQDSASRDAAYANYMDVTASNYGHSIRSALKNRNLGVSNISHYASDVSADKLVTWVESHDTYANDDEESTWMSDDDIRLGWAVIASRSGSTPLFFSRPEGGGNGVRFPGKSQIGDRGSALFEDQAITAVNRFHNVMAGQPEELSNPNGNNQIFMNQRGSHGVVLANAGSSSVSINTATKLPDGRYDNKAGAGSFQVNDGKLTGTINARSVAVLYPDDIAKAPHVFLENYKTGVTHSFNDQLTITLRADANTTKAVYQINNGPETAFKDGDQFTIGKGDPFGKTYTIMLKGTNSDGVTRTEKYSFVKRDPASAKTIGYQNPNHWSQVNAYIYKHDGSRVIELTGSWPGKPMTKNADGIYTLTLPADTDTTNAKVIFNNGSAQVPGQNQPGFDYVLNGLYNDSGLSGSLPH

SEQ ID NO: 158 - protein, 487 aa, Schwanniomyces occidentalis; identical to SEQ ID NO: 79

SEQ ID NO: 159 - protein, 583 aa, Rhizomucor pusillus
ATSDDWKGKAIYQLLTDRFGRADDSTSNCSNLSNYCGGTYEGITKHLDYISGMGFDAIWISPIPKNSDGGYHGYWATDFYQLNSNFGDESQLKALIQAAHERDMYVMLDVVANHAGPTSNGYSGYTFGDASLYHPKCTIDYNDQTSIEQCWVADELPDIDTENSDNVAILNDIVSGWVGNYSFDGIRIDTVKHIRKDFWTGYAEAAGVFATGEVFNGDPAYVGPYQKYLPSLINYPMYYALNDVFVSKSKGFSRISEMLGSNRNAFEDTSVLTTFVDNHDNPRFLNSQSDKALFKNALTYVLLGEGIPIVYYGSEQGFSGGADPANREVLWTTNYDTSSDLYQFIKTVNSVRMKSNKAVYMDIYVGDNAYAFKHGDALVVLNNYGSGSTNQVSFSVSGKFDSGASLMDIVSNITTTVSSDGTVTFNLKDGLPAIFTSATGGTTTTATPTGSGSVTSTSKTTATASKTSTSTSSTSCTTPTAVAVTFDLTATTTYGENIYLVGSISQLGDWETSDGIALSADKYTSSDPLWYVTVTLPAGESFEYKFIRIESDDSVEWESDPNREYTVPQACGTSTATVTDTWR

SEQ ID NO: 160 - protein, 616 aa, Aspergillus niger
AEWRTQSIYFLLTDRFGRTDNSTTATCDTGDQIYCGGSWQGIINHLDYIQGMGFTAIWISPITEQLPQDTADGEAYHGYWQQKIYDVNSNFGTADDLKSLSDALHARGMYLMVDVVPNHMGYAGNGNDVDYSVFDPFDSSSYFHPYCLITDWDNLTMVQDCWEGDTIVSLPDLNTTETAVRTIWYDWVADLVSNYSVDGLRIDSVLEVEPDFFPGYQEAAGVYCVGEVDNGNPALDCPYQKVLDGVLNYPIYWQLLYAFESSSGSISNLYNMIKSVASDCSDPTLLGNFIENHDNPRFASYTSDYSQAKNVLSYIFLSDGIPIVYAGEEQHYSGGKVPYNREATWLSGYDTSAELYTWIATTNAIRKLAISADSAYITYANDAFYTDSNTIAMRKGTSGSQVITVLSNKGSSGSSYTLTLSGSGYTSGTKLIEAYTCTSVTVDSSGDIPVPMASGLPRVLLPASVVDSSSLCGGSGRTTTTTTAATSTSKATTSSSSSSAAATTSSSCTATSTTLPITFEELVTTTYGEEVYLSGSISQLGEWDTSDAVKLSADDYTSSNPEWSVTVSLPVGTTFEYKFIKVDEGGSVTWESDPNREYTVPECGNGSGETVVDTWR

SEQ ID NO: 161 - protein, 512 aa, Bacillus stearothermophilus
APFNGTMMQYFEWYLPDDGTLWTKVANEANNLSSLGITALWLPPAYKGTSRSDVGYGVYDLYDLGEFNQKGTVRTKYGTKAQYLQAIQAAHAAGMQVYADVVFDHKGGADGTEWVDAVEVNPSDRNQEISGTYQIQAWTKFDFPGRGNTYSSFKWRWYHFDGVDWDESRKLSRIYKFRGKAWDWEVDTEFGNYDYLMYADLDMDHPEVVTELKNWGKWYVNTTNIDGFRLDAVKHIKFSFFPDWLSYVRSQTGKPLFTVGEYWSYDINKLHNYITKTDGTMSLFDAPLHNKFYTASKSGGAFDMRTLMTNTLMKDQPTLAVTFVDNHDTEPGQALQSWVDPWFKPLAYAFILTRQEGYPCVFYGDYYGIPQYNIPSLKSKIDPLLIARRDYAYGTQHDYLDHSDIIGWTREGGTEKPGSGLAALITDGPGGSKWMYVGKQHAGKVFYDLTGNRSDTVTINSDGWGEFKVNGGSVSVWVPRKTTVSTIARPITTRPWTGEFVRWTEPRLVAWP

SEQ ID NO: 162 - protein, 483 aa, Bacillus halmapalus
HHNGTNGTMMQYFEWHLPNDGNHWNRLRDDASNLRNRGITAIWIPPAWKGTSQNDVGYGAYDLYDLGEFNQKGTVRTKYGTRSQLESAIHALKNNGVQVYGDVVMNHKGGADATENVLAVEVNPNNRNQEISGDYTIEAWTKFDFPGRGNTYSDFKWRWYHFDGVDWDQSRQFQNRIYKFRGKAWDWEVDSENGNYDYLMYADVDMDHPEVVNELRRWGEWYTNTLNLDGFRIDAVKHIKYSFTRDWLTHVRNATGKEMFAVAEFWKNDLGALENYLNKTNWNHSVFDVPLHYNLYNASNSGGNYDMAKLLNGTVVQKHPMHAVTFVDNHDSQPGESLESFVQEWFKPLAYALILTREQGYPSVFYGDYYGIPTHSVPAMKAKIDPILEARQNFAYGTQHDYFDHHNIIGWTREGNTTHPNSGLATIMSDGPGGEKWMYVGQNKAGQVWHDITGNKPGTVTINADGWANFSVNGGSVSIWVKR

SEQ ID NO: 163 - protein, 478 aa, Aspergillus oryzae
ATPADWRSQSIYFLLTDRFARTDGSTTATCNTADQKYCGGTWQGIIDKLDYIQGMGFTAIWITPVTAQLPQTTAYGDAYHGYWQQDIYSLNENYGTADDLKALSSALHERGMYLMVDVVANHMGYDGAGSSVDYSVFKPFSSQDYFHPFCFIQNYEDQTQVEDCWLGDNTVSLPDLDTTKDVVKNEWYDWVGSLVSNYSIDGLRIDTVKHVQKDFWPGYNKAAGVYCIGEVLDGDPAYTCPYQNVMDGVLNYPIYYPLLNAFKSTSGSMDDLYNMINTVKSDCPDSTLLGTFVENHDNPRFASYTNDIALAKNVAAFIILNDGIPIIYAGQEQHYAGGNDPANREATWLSGYPTDSELYKLIASANAIRNYAISKDTGFVTYKNWPIYKDDTTIAMRKGTDGSQIVTILSNKGASGDSYTLSLSGAGYTAGQQLTEVIGCTTVTVGSDGNVPVPMAGGLPRVLYPTEKLAGSKICSSS

SEQ ID NO: 164 - protein, 483 aa, Bacillus amyloliquefaciens
VNGTLMQYFEWYTPNDGQHWKRLQNDAEHLSDIGITAVWIPPAYKGLSQSDNGYGPYDLYDLGEFQQKGTVRTKYGTKSELQDAIGSLHSRNVQVYGDVVLNHKAGADATEDVTAVEVNPANRNQETSEEYQIKAWTDFRFPGRGNTYSDFKWHWYHFDGADWDESRKISRIFKFRGEGKAWDWEVSSENGNYDYLMYADVDYDHPDVVAETKKWGIWYANELSLDGFRIDAAKHIKFSFLRDWVQAVRQATGKEMFTVAEYWQNNAGKLENYLNKTSFNQSVFDVPLHFNLQAASSQGGGYDMRRLLDGTVVSRHPEKAVTFVENHDTQPGQSLESTVQTWFKPLAYAFILTRESGYPQVFYGDMYGTKGTSPKEIPSLKDNIEPILKARKEYAYGPQHDYIDHPDVIGWTREGDSSAAKSGLAALITDGPGGSKRMYAGLKNAGETWYDITGNRSDTVKIGSDGWGEFHVNDGSVSIYVQK

SEQ ID NO: 165 - protein, 583 aa, Rhizomucor pusillus; identical to SEQ ID NO: 130

SEQ ID NO: 166 - protein, 623 aa, Kionochaeta ivoriensis
LSPAGWRQQSIYQVMTDRFARTDGSTIASCDTSQQAYCGGTWQGLINKLDYIQGMGFTAVWISPMVHQMAGATSDGESYHGYWAQDINTVNSAFGTAADLKALSAALHARGMYLMLDVVTNHFAYDGCGTCVDYSIFNPFNSESYFHPFCLIDYSNTTSIQVCWEGDNTVSLPDLRTEDSDVRSIWNSWISSVISTYGVDGLRVDSAQQVETSFWAGFEAAAGVYMVGEVFNGDPTYVTPFQDYMDGVLNYPAYYWITQAFESTSGSISNLANGMNTMKSLAKNTSLLGSFLENHDNPRFPSLTSDMSLAQNAIAFTMLMDGIPIIYQGQEQHFSGGGVPSDREAVWLSGYPNDTTLYAWITKLNAVRSWAIAKDSSYLAYMAYPVYTDTHTIAMRKGDTGYQVISVYTNVGASGSSYSVTLTSADTGFTASQSVVDLVGCKTYTADSTGSLSLSLTGGIPIILYPAASLTGNTICTSTGGTTTTATPTGSGSVTSTSKTTATASKTSTSTSSTSCTTPTAVAVTFDLTATTTYGENIYLVGSISQLGDWETSDGIALSADKYTSSDPLWYVTVTLPAGESFEYKFIRIESDDSVEWESDPNREYTVPQACGTSTATVTDTWR

SEQ ID NO: 167 - protein, 588 aa, Aspergillus niger
LSAAEWRTQSIYFLLTDRFGRTDNSTTATCDTGDQIYCGGSWQGIINHLDYIQGMGFTAIWISPITEQLPQDTADGEAYHGYWQQKIYDVNSNFGTADDLKSLSDALHARGMYLMVDVVPNHMGYAGNGNDVDYSVFDPFDSSSYFHPYCLITDWDNLTMVQDCWEGDTIVSLPDLNTTETAVRTIWYDWVADLVSNYSVDGLRIDSVLEVEPDFFPGYQEAAGVYCVGEVDNGNPALDCPYQKVLDGVLNYPIYWQLLYAFESSSGSISNLYNMIKSVASDCSDPTLLGNFIENHDNPRFASYTSDYSQAKNVLSYIFLSDGIPIVYAGEEQHYSGGKVPYNREATWLSGYDTSAELYTWIATTNAIRKLAISADSAYITYANDAFYTDSNTIAMRKGTSGSQVITVLSNKGSSGSSYTLTLSGSGYTSGTKLIEAYTCTSVTVDSSGDIPVPMASGLPRVLLPASVVDSSSLCGGSGRGATSPGGSSGSVEVTFDVYATTVYGQNIYITGDVSELGNWTPANGVALSSANYPTWSATIALPADTTIQYKYVNIDGSTVIWEDAISNREITTPASGTYTEKDTWDES

SEQ ID NO: 168 - protein, 588 aa, Aspergillus oryzae
ATPADWRSQSIYFLLTDRFARTDGSTTATCNTADQKYCGGTWQGIIDKLDYIQGMGFTAIWITPVTAQLPQTTAYGDAYHGYWQQDIYSLNENYGTADDLKALSSALHERGMYLMVDVVANHMGYDGPGSSVDYSVFVPFNSASYFHPFCFIQNWDNQTQVEDCWLGDNTVSLPDLDTTKDVVKNEWYDWVGSLVSNYSIDGLRIDTVKHVQKDFWPGYNKAAGVYCIGEVLDGDPAYTCPYQEVLDGVLNYPIYYPLLNAFKSTSGSMDDLYNMINTVKSDCPDSTLLGTFVENHDNPRFASYTNDIALAKNVAAFIILNDGIPIIYAGQEQHYAGGNDPANREATWLSGYPTDSELYKLIASANAIRNYAISKDTGFVTYKNWPIYKDDTTIAMRKGTDGSQIVTILSNKGASGDSYTLSLSGAGYTAGQQLTEVIGCTTVTVDSSGDVPVPMAGGLPRVLYPTEKLAGSKICSSSGRGATSPGGSSGSVEVTFDVYATTVYGQNIYITGDVSELGNWTPANGVALSSANYPTWSATIALPADTTIQYKYVNIDGSTVIWEDAISNREITTPASGTYTEKDTWDES

SEQ ID NO: 169 - protein, 583 aa, Penicillium canescens
LTPAEWRSQSIYFMLTDRFGRSDNSTTAACNVSDRTYCGGTWQGIINHLDYIQGMGFTAIWITPVTEQLPQDTGDGEAYHGYWQQNIYEIDSKLGTAADLLALSKALHARGMYLMVDVVANHMGYAGSGNSVDYSVFNPFSSSSYFHSYCLISNYDDQSNVENCWLGDTIVSLPDLDTTQTAVQTIWYDWIADLVSNYSIDGLRIDTVKHVQKSFWPGYNDAAGVYCVGEIFDGDPAYTCDYQNYMDGVLNYPIYYQLLYAFQSSSGSISDLYNMINSVKSDCADSTLLGNFIENHDNPRFASYTSDYSQAKNVISFLFLSDGIPIIYSGQEQHYSGGADPANREATWLSGYSTTAELYKYIATTNKIRKLAVSDSSYLTTKNVPFYQDSHTLAMKKGSSASPVITVLSNYGSSGSSYTLSLSGSGYSSGTKLMEMYTCTSVTVDSSGNIAVPMASGLPRVLMLASSANSLCGSSGATSPGGSSGSVEVTFDVYATTVYGQNIYITGDVSELGNWTPANGVALSSANYPTWSATIALPADTTIQYKYVNIDGSTVIWEDAISNREITTPASGTYTEKDTWDES

SEQ ID NO: 170 - protein, 583 aa, Acidomyces acidothermus
LTPAQWRGQSIYQVLTDRFGRTDDSTTAACDVNDYCGGSWQGIINHLDYIQDMGFSAIWISPVVENLVGDTQDGSAYHGYWAQNIYALNPNFGTVSDLVALSAALHQRGMYLMVDVVTNHMGYDGCGDCVDYSVFTPFNSQSYFHPFCLIDYNNSTSIKVCWEGDNIVSLPDMRTEDSDVATEWNTWISELVSNYSIDGLRIDSAQQVDNAFFPPFQAAAGGIHVLGEVFNGDPNYVCPYQDFMSGVLNYPAYYYITQAFQSTSGSISNLVNGINQMKSTCTDTTLLGSFLENHDNPRFPSYTSDLSLDKNAITFTILQDGIPIIYEGQEQHYSGGTVPNNREAIWLSGYDKSAPLYTWIASVNQIRNQAIFKDSNYLTYMAWPIYSDASTIAMRKGFDGLQIISVYSNKGASAASYTISLESSTTGFTANEALVEVMSCTTYTTDGSGNLAVTISGGLPAVFYPKAQLAGSGICGATSPGGSSGSVEVTFDVYATTVYGQNIYITGDVSELGNWTPANGVALSSANYPTWSATIALPADTTIQYKYVNIDGSTVIWEDAISNREITTPASGTYTEKDTWDES

SEQ ID NO: 171 - protein, 586 aa, Kinochaeta ivoriensis
LSPAGWRQQSIYQVMTDRFARTDGSTIASCDTSQQAYCGGTWQGLINKLDYIQGMGFTAVWISPMVHQMAGATSDGESYHGYWAQDINTVNSAFGTAADLKALSAALHARGMYLMLDVVTNHFAYDGCGTCVDYSIFNPFNSESYFHPFCLIDYSNTTSIQVCWEGDNTVSLPDLRTEDSDVRSIWNSWISSVISTYGVDGLRVDSAQQVETSFWAGFEAAAGVYMVGEVFNGDPTYVTPFQDYMDGVLNYPAYYWITQAFESTSGSISNLANGMNTMKSLAKNTSLLGSFLENHDNPRFPSLTSDMSLAQNAIAFTMLMDGIPIIYQGQEQHFSGGGVPSDREAVWLSGYPNDTTLYAWITKLNAVRSWAIAKDSSYLAYMAYPVYTDTHTIAMRKGDTGYQVISVYTNVGASGSSYSVTLTSADTGFTASQSVVDLVGCKTYTADSTGSLSLSLTGGIPIILYPAASLTGNTICTSGATSPGGSSGSVEVTFDVYATTVYGQNIYITGDVSELGNWTPANGVALSSANYPTWSATIALPADTTIQYKYVNIDGSTVIWEDAISNREITTPASGTYTEKDTWDES

SEQ ID NO: 172 - protein, 585 aa, Aspergillus terreus
LTPAEWRSQSIYFLLTDRFGRTDNSTTAACDTSDRVYCGGSWQGIINQLDYIQGMGFTAIWITPVTGQFYENTGDGTSYHGYWQQDIYDLNYNYGTAQDLKNLANALHERGMYLMVDVVANHMGYDGAGNTVDYSVFNPFSSSSYFHPYCLISNYDNQTNVEDCWLGDTTVSLPDLDTTSTAVRNIWYDWVADLVANYSIDGLRVDTVKHVEKDFWPGYNSAAGVYCVGEVYSGDPAYTCPYQNYMDGVLNYPIYYQLLYAFESSSGSISDLYNMISSVASSCKDPTLLGNFIENHDNPRFASYTSDYSQAKNVITFIFLSDGIPIVYAGQEQHYSGGSDPANREATWLSGYSTSATLYTWIATTNQIRSLAISKDAGYVQAKNNPFYSDSNTIAMRKGTTAGAQVITVLSNKGASGSSYTLSLSGTGYSAGVTLVETYTCTTVTVDSSGNLPVPMTSGLPRVFVPSSWVNGSALCNGATSPGGSSGSVEVTFDVYATTVYGQNIYITGDVSELGNWTPANGVALSSANYPTWSATIALPADTTIQYKYVNIDGSTVIWEDAISNREITTPASGTYTEKDTWDES

SEQ ID NO: 173 - protein, 565 aa, Thamnidium elegans
VPLSVLDKRNGVTTLSKRAAAADWKSRSIYQLVTDRFGRSDGSTSACGDLSNYCGGDYKGIQNQLDYIAGMGFDAIWISPIPENTDGGYHGYWAKDFEKLNTNFGSADDLKALVTAAHGKGMYVMLDVVANHAGPASGGDYSGFTFSSASNYHPQCTIDYDNQTSVEQCWVADDLPDINTEDDTIVSKLHSIVSDWVTTYDFDGIRIDTVKHIRKDFWSGYEEAAGVFATGEVFDGDAAYVGPYQDQLSSLINYPLYYAIRDVFSAGSGFSRISDMLSTIKSNFKDPSVLTTFVDNQDNARFLSVKSDMSLYKNALAFTILTEGIPVVYYGTEQGFKGGDDPKNREVLWTSNYDTSSDLYKFIKIVNNDVRQKSDKTVTLDVDVGTNTYAFTHGKNLIVVNNYGSGSTESVTVKVGDSVADGTKLVDAVSNITATVSGGSITFSLKDGLPALFVPSSGATSPGGSSGSVEVTFDVYATTVYGQNIYITGDVSELGNWTPANGVALSSANYPTWSATIALPADTTIQYKYVNIDGSTVIWEDAISNREITTPASGTYTEKDTWDES

SEQ ID NO: 174 - protein, 574 aa, Meripilus giganteus
RPTVFDAGADAHSLHARAPSGSKDVIIQMFEWNWDSVAAECTNFIGPAGYGFVQVSPPQETIQGAQWWTDYQPVSYTLTGKRGDRSQFANMITTCHAAGVGVIVDTIWNHMAGVDSGTGTAGSSFTHYNYPGIYQNQDFHHCGLEPGDDIVNYDNAVEVQTCELVNLADLATDTEYVRGRLAQYGNDLLSLGADGLRLDASKHIPVGDIANILSRLSRSVYITQEVIFGAGEPITPNQYTGNGDVQEFRYTSALKDAFLSSGISNLQDFENRGWVPGSGANVFVVNHDTERNGASLNNNSPSNTYVTATIFSLAHPYGTPTILSSYDGFTNTDAGAPNNNVGTCSTSGGANGWLCQHRWTAIAGMVGFRNNVGSAALNNWQAPQSQQIAFGRGALGFVAINNADSAWSTTFTTSLPDGSYCDVISGKASGSSCTGSSFTVSGGKLTATVPARSAIAVHTGQKGSGGGATSPGGSSGSVEVTFDVYATTVYGQNIYITGDVSELGNWTPANGVALSSANYPTWSATIALPADTTIQYKYVNIDGSTVIWEDAISNREITTPASGTYTEKDTWDES

SEQ ID NO: 175 - protein, 671 aa, Chaetomium megalocarpum
LYINGSVTAPCDSPIYCQGEILKAIELARPFSDSKTFVDMPTIKPVDEVIAAFSRLSQPLSNNSELTAFLAENFAPAGGELEEVPISELETDPSFLNKLEDVDIKEFVGKVIDIWPDLTRRYAGPGNCSQCANSFIPVNRTFVVAGGRFREPYYWDSYWILEGLLRTGGAFTQISKNMIENFLDFVETIGFVPNGARIYYLNRSQPPLLTLMVKTYVDYTNDTSILERALPLLVKEYEFWTNNRTVSITATDGKEYTLNRYSVNNNQPRPESYREDYVTANNASYYAQSGIIYPVKTPLNETEKAELYSNLASGAESGWDYTARWLKTPDDAARDVYFPLRSLNVRSIVSVDLNSILYQNEVIISEYLEQAGNSSEAKRFADAAEQRSEAMYALMWNATHWSYFDYNLTDNSQRVFVPADADTAPSDQTAAPPGQQVLFDIAQLYPFWTGAAPASLKANPLAVQNAYARVARMLDTKAGAIAATNLRTGQQWDQPNVWPPLQHILMKGLLNTPATFGTEDPAYAHTQDLALRLAQRYLDSTFCTWYATGGSTSATPQLQGAAPGATGTMFEKYADDATNVAGGGGEYEVVEGFGWTNGVLIWAADVFGDRLVRPDCGNITAAHTHSSEKRTVAGASRPDAGASGVRRERRAVELDPWDAAWTKMFGRSKLR

SEQ ID NO: 176 - protein, 662 aa, Lecanicillium psalliotae
LYQNGSVIAPCDSPIYCHGDILKEVELARPFTDSKTFVDMPAKKPLAEIQAAFDKLEKPLSNNTALNEFLSTYFEDAGGELKAVSKDKLKTDAKFVDKLNDTVIKEFVNKVIDIWPDLTREYAGSATNCTNCPNSFIPVNRTFVVAGGRFREPYYWDSYWIVEGLLRTGGAFVDITKNTIENFLDLIEQFGFIPNGARLYYLNRSQPPLLSQMVKNYISYTNDTDILKRALPILVKEHEFFMNNRSVEITVENKTYTLNRYAVSNTQPRPESFREDYNTVNNNSYYAASGIIYPVKTPLNESEQATLYANLASGAESGLDYTTAKWSTNPRDSMEDIYFPLRSLNIMNIVPVDLNSILYGNEKAISEFYNITGNSSEADSWSKKAAERQEAIQAVFWNETLYSYFDYNRTSSSQHIYIPSDDDTQSFENATAPAGMQEVFTVTQFYPFWMGAAPDYIRNNPHAVKTAYSRIAKYLELKPGGIPSSNLRSGQQWDQPSVWPPLMHVLMKGLVNTPATFGKEDPAYKDVHKLALTLGQRYLDSTFCTWYATGGSTSETPQLSGLSDSDVGIMFEKYDDTSINHAGGGGEYEVVEGFGWSNGVLMWVADTFGNELKRPDCGNITAANVHPGKRSVSAVELSSRDAQRVKKFGRRAEGRMKVPGVL

SEQ ID NO: 177 - protein, 637 aa, Doratomyces sp.
LYTNGSIIAPCDSPIYCHGDILHQVQLAHPFPDSKTFVDMPAIKSVDEIQAAFDKLDKPLKNDTALQNFLAENFAEAGHELAEVDPSELSTDPRFLDKVSDTVIHEFTQKVIDIWPDLTRSYSPSGAGSDCPDCPNSFLPVNRTFVVAGGRFREPYYWDSYWIVEGLLRTGGDFLGVSRNIIENFLDFVDDFGFVPNGARRYYLNRSQPPLLSLMVKSYVEQTNDTEILDRAVPLLIKEYEFWTKNRTVEVPFGNETITLNQYNVDNTQPRPESYREDYITATNASYYSASGEVYEEVEKLNETQRATVYRNLATGAESGWDYTSRWMARPRDAVEDVYFPLRSLNIIEIVPVDLNSILYANELAIAEFVRLAGADDCEEEAAAWEALAEKRSADMHRLMWNDTLHSYFDYNLTSSSQNVYVPADNDTAPFERPGGTPEGSQVFFSAAQFYPFWTGAAPSSLRDDPAAVQLAYSRVASYLDLRAGGIPATNLRTGQQWDQPSVWPPLMHILTSGLLNTSPASASDDDDPSYAPTRDLALSLAQRYLDSTFCTWYATGGSTSETPQLDGFTDEDKGAMFEKYDDSATNVAGGGGEYEVVEGFGWTNGVLIWMVDTFGDELSRPDCGDIEAANAHPARK

SEQ ID NO: 178 - protein, 601 aa, Mucor moelleri
IQNHTSFSCDSPIYCEGDILHTVQLAKIFSDSKTFVDMPTSKSESQVIEAFKAIGGRNATIAQVQQFLNENFLTAGTEVKRLTNITIPELNWIDNITDPDYRGWISKLNQAWSNLTFTFDTSVLCQDCATSTLPVSRPFVVPGGRFREFYYWDSFFVIKGLLLSDQVELAKNMILNFFDFIDTYGFIPNGARIYYLNRSQPPFLTQMVEAFWEKTSDKEFMTNALPFLDKEYNFWMTNNSISVPDPKNPSKKYKMNHYVTLNTSPRPESYVEDYNTVNNGTDYSQAVKLQLYADIAAGAETGWDYSSRWTRQKHPAPNQTEGYEMLRSINTANIVPIDLNSLLWNTETMLAEWHDRFGEKSKSKKKSAYYQTQAKKRLDAMEKLMWNPTDYTYYDYNLTSSSQNLEFTPANLFPIWLGALPNKVMKNKTELARVFDETENALRKYPGILTTSYYNTTMQWDWPNGWPPLSYVAMEGMNKVEESLNGKKGSKQDGKTYTTSRGTSLARLSFTLAERYAASAYCGWYKTGGSIPGILNKIDGVADDGHMFEKFDVNTIGISGSQGEYVSQTGFGWTNGIALWIFDTYANLTAPDCNQTITLNI

SEQ ID NO: 179 - protein, 650 aa, Phialophora cyclaminis
LYINGSVIAPCDSPIYCHGELLKAIELARPFSDSKTFVDMPTRKPVDEVVAAFEKLSKPVVNDTKLGEFLQANFLPAGGDLSDFPPGSLETDPKFLDNINDTVIREFTEAVIDIWPDLTRRYVGASNCTGCANSFIPVNRTFVVAGGRFREPYYWDSYWIIEGLLRTGGNFVQISKNIIENFLDFVETIGFVPNGARIYYLNRSQPPLLTAMVKAYLEHTNDTKILDRAVPLLIKEYNFWITNRSVTLTGPDGNEYTLQRYSVNNNQPRPESYREDYNTANNKSYYSTSGIIYPENVSLNDSEKKELYANLATGAESGWDYGTRWLSRPADALRDVYFPLRYVKTRDLVPVDLNAILYQNEASISSFLYIQGNDTGAAHFAKLAAARQKAMTAVLWNATLFSYFDYNMTSSSHFSFIPVDDDATSIETATAPRGFQQIFHVAQLYPFWTGAAPASLRENPLAVQRAFSRVSQMLEEKAGSIPATNFYTGQQWDEPNVWPPLQHIIMEGLRNTPATFGEDDPIYQGVQDLALRVAQRYLDSTFCTWYATGGSTSLTPKLAGLTDNAKGIMFEKYGDNSTNVAGGGGEYEVVEGFGWTNGVLIWAVDTFGNKLKRPDCGDIQPAHVEARGLQRRAVELDKWDAQWVKRFGAK

SEQ ID NO: 180 - protein, 654 aa, Thielavia arenaria
LYINGSVIAPCDSPLYCHGDILKAIELARPFQDSKTFVDMPTIRPVEEVIAAFNRLSQPLSNNSELNAFLQANFAPAGGELEEVPESELSTNPVFLDKLNDTVIKEFVAKVIDIWPDLTRRYAGPGNCSECADSFIPVNRTFVIAGGRFREPYYWDSFWILEGLLRTGGAFTEISKNMIENFLDFVETIGHIPNGARIYYLNRSQPPLLAGMVKNYVDYTNDTSILERALPLLIKEYEFWTNNRTVQVTASDGKTYTLHRYNVNNNQPRPESYREDWITANNASYYAASGIIYPVKTPLNESEKAALYSNLASGAESGWDYGTRFLMRPEDAARDIYFPLRHLNVRDMVTVDLNAILYQNEVIISEYLEQAGNNTEAERFASAARQRSEAMYALMWNETLWSYFDYNLTSNSQYTFIPADVNATAAEKANAPEGQKVIFHIAQLYPFWTGAAPDQLKNNPLAVQKAYSRVAEMLDIKPGAIPATNFITGQQWDQPNVWPPLMHVLMAGLLNTPPTFGEDDPAYQAVQALALRLGQRYLDSTFCTWYATGGETSQTPRLQGVSPDATGTMFEKYADNAINVAGGGGEYEVVEGFGWTNGVLIWAADVFANGLKRPDCGNITAAHTHNGAKRAVELHPRDAAWTKKFGKRALKKRA

SEQ ID NO: 181 - protein, 661 aa, Thielavia antarctica
LYVNGSVTAPCDSPLYCQGEILKAIELARPFADSKTFVDMPTLRPLDDVIAAFRKLSQPLSNSSELNAFLAANFAPAGGELEEVPKSELRTKPAFLDKVEDVVIKEFVGKVIDIWPDLTRRYAGPGNCTECANSFIPVNRTFVVAGGRFREPYYWDSYWILEGLLRTGGDFTKISRNIIENFLDFVDTIGFVPNGARIYYLNRSQPPVLTLMVKTYVDYTNDTSILERALPLLIKEHEFWTTNRSVSVEVDGKTHTLNRYFVNNNQPRPESYREDWITANNASYYAASGIIYPVKTPLNGTQQAELYANLASGAESGWDYTSRWLKTPSDAARDVYFPLRSLNVINTIPVDLNSILYQNEVIISEYLEQAGNKSGAEKFSDAARQRSEAMYALMWNATNWSYFDYNLTSSGQNTHFPADADATAAETTSSPAGTQLLFSVSQLYPFWTGAAPQQLKSNPLAVTQAYARVAAMLDAKAGAIPATNLLTGQQWDEPNVWPPLQHVLMQGLLNTPATFGADDPAYQATQALALRLAQRYLDSTFCTWYATGGSTSATPRLAGVSAGAEGSMFEKYGDDSTNVAGGGGEYEVVEGFGWTNGVLIWAADVFAGKLQRPECGDIEAAQTHGGAARRGLGMERRAIELDPWDARWTKAFGKRALRRRA

SEQ ID NO: 182 - protein, 667 aa, Chaetomium sp.
LYINGSVTAPCDSPLYCQGEILKAIELARPFSDSKTFVDMPTIKPVDDVIAAFSRLSQPLSNNSELNAFLAENFAPAGGELEEVPESELETDPAFLDKLEDTTIKEFVTKVIDIWPDLTRRYAGPGNCSKCANSFIPVNRTFVVAGGRFREPYYWDSYWILEGLLRTGGAFTEISKNIIENFLDFVDTIGFIPNGARIYYLNRSQPPLLTLMVKTYVDYTNDTSILERALPLLIKEHEFWTNNRSVAITAADGKKYTLQRYYVNNNQPRPESFREDYITANNASYYAASGIIYPVKTPLNETEKAELYSNLASGAEAGWDYTARWLKTPNDAARDVYFPLRSLNVIGMVPVDLNSILYQNEVIIAEYLQQAGNSSEARRFATAAEKRSEAMYALMWNSTHWSYFDYNLTSNSQRIFVPTDADADPVDQTNAPPGHQVLFDIAQLYPFWTGAAPASLKNNPLAVQLAYARVAHMLDTKAGAIPGTNFRTGQQWDQPNVWPPLQHVLMKGLLNTPPTFGEADPAYQEVQRLALRLAQRYLDSTFCTWYATGGSTSDMPQLQGVNPGATGTMFEKYADNATNVAGGGGEYEVVEGFGWTNGVLIWAADVFGEGLTRPDCGNITAAHTHSGAKRGLDGGEGGAGGLWGRRAVELDPWDARWTKMFGRRKRE

SEQ ID NO: 183 - protein, 671 aa, Chaetomium nigricolor
LYINGSVTAPCDSPLYCQGEILRAIELARPFSDSKTFVDMPTIKPLEEVIAAFNQLTQPLSNNSELNTFLAENFAPAGGELEEVPKDELNTDPGFLDKLNDTTIREFVAKVIDIWPDLTRRYAGGGNCSECANSFIPVNRTFVVAGGRFREPYYWDSYWILEGLLRTGGAFIEISKNIIENFLDFVETIGFIPNGARIYYLNRSQPPLLTLMVKTYVDYTNDTSILERALPLLIKEHEFWVNNRSVEITAANGQTYTLNRYHVNNNQPRPESYREDYITANNGSYYAASGIIYPVRTPLNETEKAELYANLASGAESGWDYTARWLKTPNDAANDVYFPLRSLNVRGLVPVDLNSILYQNEVIIAEYLQQAGNLSLAQRFAEAAEQRSEAMYALMWNATYWSYFDYNLTSNSQRIFVPLDADSRTIETVGAPPGHQVLFDIAQLYPFWTGAAPANLKNNPLAVQQAYSRVASMLDAKAGAIPATNFRTGQQWDQPNVWPPLQHILMQGLLNTPPTFGDSDPAYQHVRDLALRLAQRYLDSTFCTWYATGGSTSDMPQLQGVSPDATGTMFEKYADNATNVAGGGGEYEVVEGFGWTNGVLIWAADVFGDALKRPDCGDIEAAHTHQAKKRDVEGLERRAVELDPWDAAWTKMFGRSKLRKRGAGGQKRWVS

SEQ ID NO: 184 - protein, 666 aa, Chaetomium jodhpurense
LYFNGSVIAPCDSPLYCQGEILKAIELARPFSDSKTFVDMPTIKPVDEVIAAFNRLSQPLTNNSELNAFLAENFAPAGGELEEVPKDELNTDPKFLDKLEDATIKEFVAKVIDIWPDLTRRYAGASNCSECANSFIPVNRTFVIAGGRFREPYYWDSYWILEGLLRTGGAYTQISRNMLENFLDFVETIGFIPNGARIYYLNRSQPPLLAMMIKNYVDYTNDTSILDRALPLLIKEHEFWINNRSVSITAADGKQYTLHRYNVNNNQPRPESYREDYITANNASYYAASGIIYPVKTPLNESEKAELYANLATGAESGWDYTARWLKTPNDAAKDVYFPLRSLNVRGMVSVDLNSILYQNEVIIAEYLERAGNISEAERFAAMAQQRSEAMYALMWNSTHWSYFDYNLTSNSQRIFVPLDDDSSTAEQANSPPGHQVLFDIAQLYPFWTGAAPESLKSNPLAVQLAYSRVARMLDTKAGAIPATNFRTGQQWDQPNVWPPLQHVLMAGLLNTPPTFGESDPAYQNVRALALRLAQRYLDSTFCTWYATGGETSQTPRLQGVSPDATGTMFEKYADNATNVAGGGGEYEVVEGFGWTNGVLIWAADVFADGLKKPDCGNITAAHTHSAKRGLERRAVELDPWDAAWTKMFGRSKLRKREEGRKRWLS

SEQ ID NO: 185 - protein, 670 aa, Chaetomium piluliferum
LYINGSVIAPCDSPLYCHGEILKAIELARPFSDSKTFVDMPTIKPLDEVIAAFSQLSQPLSNNSELNAFLAENFAPAGGELEEVSKDELQTDPTFLDKLDDTTIKEFVSKVIDIWPELTRRYVGSSDCSGCANSFIPINRTFVVAGGRFREPYYWDSYWILEGLLRTGGAFVDISRNIIENFLDFVETIGFVPNGARIYYLNRSQPPLLTLMVKTYVDYTNDTSILERALPLLVKEHEFWTTNRSVSITANGKEYTLNRYSVNNNQPRPESYREDYITASNESYYAESGIIYPVRTPLNETEKAELYSNLASGAESGWDYTSRWLKTPNDAANDVYFPLRSLNVLGLVPVDLNSILYQNEVILAEYFEQAGNSSEAERFAAAAEQRSEAMYDLMWNATHWSYFDYNLTSSSQRIFVPLDDGASTQEQSTSPPGYQVLFDVAQLYPFWTGAAPAALKSNPLAVQHAYSRVADMLNTKAGAIPATNFRTGQQWDQPNVWPPLQHIIMQGLLNTPPTFGESDPAYENTQSLALRLAQRYLDSTFCTWYATGGSTSDMPPLQGVSAGATGTMFEKYADDATNVAGGGGEYEVVEGFGWTNGVLIWAADVFGDALKRPDCGNITAASTHEGATKRDLRGLGRRAVELDPWDAAWTKMFGRAKLRKREQGRETWVN

SEQ ID NO: 186 - protein, 674 aa, Myceliophthora hinnulea
LYINGSVTAPCDSPIYCHGELLKGVELAHPFVDSKTFVDMPTLKPVDEVLAAFSKLRQPLSNNSELNNFLAEYFAPAGHELEEVPDSELQTDPKFLDKLEDRTIKEFVSKVIDIWPDLTRRYAGPGDCSDCANSFIPVNRTFVVAGGRFREPYYWDSYWILEGLLRTGGAFTQISKNIIENFLDFIDTIGFIPNGARIYYLNRSQPPLLTRMVKSYVDYTNDTSILERALPLLIKEHDFFTNNRSVSVTASNGKTYTLHRYHVENNQPRPESYREDYITANNGSYYAASGIIYPVKTPLNETEKAVLYSNLASGAESGWDYTARWLRVPDDAARDVYFPLRSLNVREIVPVDLNSILYENEVIIAGYLEKAGNSSEAKRFASAAKQRSEAMYNLMWNATHWSYFDYNLTSNAQNIFIPADEDTAPFDRTAAPPGKQVLFHIAQLYPFWTGAAPAHLKSNPLAVQKAYARVSRMLDSKKGAIAATNYRTGQQWDQPNVWPPLQHVLMQGLLNTPATFGESDPAYQGVQKLALRLAQRYLDSTFCTWYATGGSTSDFPQLQGVSPDATGIMFEKYADSAINVAGSGGEYEVVEGFGWTNGVLIWAADVFGNKLKRPDCGNITAAHTHSEAKRSLGDGGLARRAVELDPWDAAWTKMFGRSKLRRREAEDVRKRWSS

SEQ ID NO: 187 - protein, 659 aa, Chloridium virescens
LYINGSVIAPCDSPLYCQGDILKAIQLAQPFSDSKTFVDMPTTQPVDQVIAAFNQLPQPVSNNSGLQNFLSTYFAPAGGELTEVPKDQLQTNPMFLNKLNDTVIREFVTAVIDIWPDLTRTYTGASNCTGCSDSFIPVNRTFVVAGGRFREPYYWDSFWILQGLLRTGGAFTQISKNIIENFLDLVDQFGFVPNGARVYYLNRSQPPVLSEMVRTYVAYTNDTSILARAIPTLIKEHNFWMQNRTVNITGADGNTYTLNQYHVENTQPRPESYTEDYITANNHSYYATSGIIYPETKPLNDSEIANLYANLASGAESGWDYGSRYLARPNDAAQDVYFPLRSLNVLNIVPLDLNSLLYQSEQNIALFLQATGNSSEAEQWTSLAAQRQTAIHALMWNETLWSYFDYNLTSNGQNIYVPADKDATPADTASAPPGYQVLFDVAQFYPFWTGAATDELRRNPLAVRQAFTRVDAYLTAKAGGIPATNLMTGQQWDQPNVWPPLMHVLMQSLLDTPATFGAADPSYAALQGLALRLAQRYLDMTFCTWYATGGSTSQTPKLQGLGPDAVGTMFEKYADNATNIAGSGGEYTVVEGFGWTNGVLIWAADTFGAQLTRPNCGNITAAHVTPGKRSVGLGRRAVELHESDARWVKMFGSRAWRNA

SEQ ID NO: 188 - protein, 662 aa, Gelasinospora cratophora
LYVNGSVTAPCDSPIYCYGELLHQVELARPFSDSKTFVDMPTIKPVDEVLEAFSKLTLPLSNNSELHEFLNTYFGPAGGELEAVPTDQLHVSPTFLDNVSDDVVKQFVNSVINIWPDLTRKYVGAGEICTGCANSFIPVNRTFVVAGGRFREPYYWDSFWILEGLLRTGGAFTEISKNTIENFLDLVEQIGFVPNGARLYYLNRSQPPLLTQMVRIYVEHTNDTSILERAVPILKKEWEWWITNRTVEVTADGKTYSLQRYHVDNNQPRPESYSEDYITANNNSYYATSGIIYPETTPLNDTQKAQLYANLASGAESGWDYSTRWLKNPNDAARDVYFPLRSLNVLEIVPVDLNSILYQNEVTIGKFLAQQGNKDEAEEWAKKAEQRSEAMYKLMWNSTLWSYFDYNLTSSSQNIYVPADPQVFPFEKPSGTPEGYQVLFSINQMFPFWTGAAPDQLKANPLAVKLTFDRVKNYLDNKAGGIPATNFVTGQQWDEPNVWPPLMHVLMDGLLNTPATFGEDDPAYQETQNLALRLAQRYVDSTFCTWWATGGSTSETPKLQGLGSDAKGIMFEKYADNSTNVAGGGGEYEVVEGFGWTNGVLIWAADKFGDKLKRPNCGDLTPANVGKRAVELDAFDAKFTKKFARKGKLEKLKAKFKRRAAI

SEQ ID NO: 189 - protein, 543 aa, Acidobacteriaceae bacterium
QTTTTSAGLHDTLAYIKRTWHTLERSNKTLLKSADDVKVGQAGTLTLYVSQDVKPQAVNASLRRELPPADKKRIVVRQLPEHPEAVEPAGLLYLPYPYVVPGGRFNEMYGWDSYFILLGLVHDDELALAKNMTDNFIYEIEHYGMILNANRTYYLTRSQPPFLTQMILEVYRRTGDGKWLASTLPAIEKYYAYWMREPHLTPETGLSRYWGGADTPAPEVVHGEKDAAGHNQYDRVREYYRTHNVTAYDVSQYYDKATDRLKPLFYIADRAMRESGFDPSSRYGPFSADIIHYDPVCLNSLLYRMESDTATILKQLNRTSEARVWEKRATQRAELVNRLMWNEEKGLYFDYDFITRRQSNYHFVTTFYPLWAGIASRQQADRVRKNLSIFERAGGLQTSDYISGSQWDAPFGWAPLQIMTVEGLRRYGFNEDADRISRKFINMVVRDFEEHGTIKEKYDVVIGKSDLAAGLKFGYTSNEAGFGWTNAAVVLFIEELAGERPLAASLDRESMPMLRQRHLSPQPSVWPPFSPQAPQYRRRDPYR

SEQ ID NO: 190 - protein, 532 aa, Acidobacterium capsulatum
GARSSLSPHAVAGPQPIDAYIHTAWSTLTRSMSDCKSVADPKLKSTPVLYLPRDLAVPANVAAMQKQCHVRVLRLPIVITHFDQIRESQIATPGLLYLPHPYVVPGGRFNEMYGWDSFFILKGLLDDHHIALARGIVENFFFEIAHYGGILNANRTYYFTRSQPPFLSSMIRAIYAAEVAEGHTQAAHAWLVEAYPYAVRDHALWMSPIHQAGNTGLARYFDTGQGPVPEMADDSTYYQDVIRWLLAHPGLHTGYLMHGSPHLDAAARERLAQLSCDPTLSKVCARAHVHGYWLTRSFYKGDRAMRESGFDTTFRFGPFSGSTQHFAPVGLNALLYKYERDLAWMAAQLGKPGEAAKWNSEAETRRAEMNHYLWNAQKKMYFDYNFETHRQSSYAFITTFYPLWAGAADKAQQQGVIASLPLFEHPGGLAISNHDSGVQWDLPYGWAPTEWMAVQGLLRADDQHDARRIASEFNRTVRTTYQHDHAIYEKYDVVNRSNDFRVTAGYTQNVVGFGWTNAVYLEFQSLLAHPGQ

SEQ ID NO: 191 - protein, 568 aa, Acidovorax wautersii
AAAVSSGLRISERHPAYSTNPARVQVPGAPGAPPSDHCTPADRYQELFVAVQSQQIFEDSKTFVDCGPIGEPEDILAAYRAEHAQPDFDLARFVAQHFTAPQVAANDYVGAPGMALAEHIDALWPVLTRKPEDHPVRGSALPLAHPYVVPGGRFAELYYWDSYFTMLGLAATGRSELVQCMTDNFARLIDAFGFVPNGTRTYYLSRSQPPLFAAMAELGALVGGPPVSHYLPQLLQEHAWWMDGLHVLHPGEARRRVVALPGGEILNRYWDDRDTPREESWREDIETASAVDRPSADVYRDLRAAAESGWDFSTRWLRAPDAANPASLHLSQICTTDLLPVDLNAFLYRMEVSIAKASQSAGDRATATHFHDLAAHRREAVNRLMWNEAEGAYFDYDWRRGELRGCLTAATVVPLYAGMATEAQAAAVARAVRTHLLAAGGLATTVCSSDQQWDRPNGWAPLQWMAVRGLERYGHKDLALEVRQRWIETVRSVYQREGKLVEKYAVGNGDGAPLCGGGGGEYPLQDGFGWTNGVVQCWLDPRYDTYAAAQTVYYGPTDDGTADSLPEA

SEQ ID NO: 192 - protein, 529 aa, Xanthomonas arboricola
APMDTPVVNAPAATPPTPDLAYPELFQAVQSGELFDDQKHFVDFLPLRDPALINADYLAQHDHPGFDLRKFVDANFEESPPVQTDAIRQDTALREHIDELWPKLVRSQTHVPPYSSLLALPHPYVVPGGRFREVYYWDSYFTMLGLVKSGETTLSRQMLDNFAYLIDTYGHIPNGNRSYYLSRSQPPFFSYMVELQAGVEGEAVYQRYLPQLRKEYAYWMQGSEDLQPGQAARHVVRLADGSLLNRYWDERDTPRPEAWLHDTRTAAEAGDRPAAEVYRDLRAGAESGWDYTSRWLADGQNLRTIRTTAIVPIDLNSLLYHLERTLAQACAQPGAECAQDYAALALRRKQAIDAHLWNAAGYYADYDWQTRKLSDQVTAAALYPLFTGLATDAHAKRTASTVRARLLRPGGLATTAVKTGQQWDEPNGWAPLQWVAVDGLRRYGEDALARTIGERFLTQVQALFAREHKLVEKYGLEADAAGGGGGEYALQDGFGWTNGVTLMLLNLYPDTATKPAPAKRARKPEAAAR

SEQ ID NO: 193 - protein, 540 aa, Kosakonia sacchari
AEAQNTPQPPDILLGPLFSDVQTAKLFPDQKTFADAVPKGDPLMILADYRMQRMQTSFDLRHFVDVNFTLPKEGEKYVPPEGQNLREHIDGLWPVLTRTTDSAGKWDSLLPLPKPYVVPGGRFREVYYWDSYFTMLGLAESGHWDKIEDMVTNFAHEIDTWGHIPNGNRSYYLSRSQPPFFSLMVELLATHDGDEALKTWLPQMEKEYQYWMEGADTLQPGQANKRVVKLSDGSVLNRYWDDRDTPRPESWLDDVTTAKNNPNRPATEIYRDLRSAAASGWDFSSRWMDDPNQLGTIRTTSIVPVDLNALMFKMEKMLARGYQAAGDSAKASQYDALANARQKGIEANLWNEKEGWYADYDLKTKKVRNQLTAAALYPLFVNAAAKDRADKVASAAKERLLKPGGIATTTVNSGQQWDAPNGWAPLQWVATAGLQNYDQQKLAMEVSWRFLTNVQHTYDREKKLVEKYDVSTTGTGGGGGEYPLQDGFGWTNGVTLKMLDQICPKEKPCDSVPQTQPAQQPAAKVEPTSQPSKQQQAVAQ

SEQ ID NO: 194 - protein, 532 aa, Enterobacter sp.
DEQPAFQKNSPDILLGPLFNDVQSAKLFPDQKTFADAVPKSDPLMILADYRMQHTQSSFDLRHFVEMNFTLPAEGEKYVPPAGQSLREHIDDLWPVLTRTTDKASNKWDSLLPLPKPYVVPGGRFREVYYWDSYFTMLGLAESGHWDKISDMVDNFAWEIDTFGHIPNGNRSYYLSRSQPPFFSMMVELLATHDSDALKKYRPQMEKEYAYWMEGVDSLQPGQANQRVVKLDDGSVLNRYWDDRDTPRPESWLDDVNTAKNNPNRPATEIYRDLRSAAASGWDFSSRWMDDPQKLGTIRTTSIVPVDLNALMFKMEKLLARASQEAGDSAAASKYEALATARQKAIENHLWNDKEGWYADYDLKSKKVRNQLTAAALFPLYVKAASQERADKVAAATSARLLKPGGITTTTINSGQQWDAPNGWAPLQWVATEGLQNYGQNKVAMDVTWRFLKNVQHTYDREKKLVEKYDVSTTGTGGGGGEYPLQDGFGWSNGVTLKMLDLVCPKEKPCDSVPENQPAANDEAAPVKASAQ

SEQ ID NO: 195 - protein, 720 aa, Saitozyma flava
QNPASSSSFSPTPVTTMVPSPTAALNATVPGQGVYPPLQAWCNNGGNDTFCPGVLLQDVQLSGIFPDSKTFVDKPTRGTLNETLRTFASLGNNLTVGQIEGFVNNSFKGEGLELSQVALEGFNPNPAFLDTISDPIYQGWMSVVNSYWTLLIRETNRSALCNGDCESSLIPLNNTIVVPGGRYREIYYWDSYWILIGLLESELTAYATDLISNFMDFIQTYGFIPNGGRKYYLNRSQPPVFTQMLNTYVQRTGNTSILARGLPLAHQELVWWENNRVISVTSPYSNITRRVAHFAVNNTAPRPEGYVEDYETAFGASPALNETARGQLYSDLAAGAESGWDYSSRWCKQPVINLTDNFPALRTINTAKIIPVDLNSLLAGDHTLLANLYELYGNSSNANTSVTSNSSQLVPYHRQLAKNYSDAVLDLHWDAQKAWFYDFNLTANARADIYHPGGTFALWQNITPPAVASNETYALEVVSGARFLLGKYTSIPSVSTLIETGLNWDFPNSWPPHVYSSIKAFETLGRAFPNASVLSNISIPFSDVQKNQLGLDESAIPAQPASTIGNSTSQIAEAQGKPWPQALSIEYANRYMQAAFCSWYSTGGSIDGLLTQLPLSELNMTGTFQAGTTGVMFEKFNVTDLDAAGGGGEYKVQIGFGWTNGVALWLGANFGQYLPQPTCPLIPIIEVQNGMNSSVYQNGTMTNSTKTQSYIFQGHRIPRK

SEQ ID NO: 196 - protein, 723 aa, Phaeotremella skinneri
QTPTSSSSSSFSATPVSTSVPSPTVPLNSSVIGQGLYPPAQAWCNGGMNDTFCPGVLLQDVELSGIFADSKTFPDKPTVGTLNSTLQAFAALPANVTVGEIETFVNQYFKGEGLELEQVAIEGFVANPAILNNITDPVFKGWVSTVNGYWQLLIRQTNESSLCNETSCASSLIPLNHTIVVPGGRYREIYYWDSFWILQGLLKSELYTYSWDLLQNFMDLIETYGFLPNGGRKYYLNRSQPPVFIQMLDAYIKVTGNSSILARALPIATTELAWWSSNRTIPVTSPYTGITHLVAHYAVTNSAPRPEGYVEDFTTAMGASPALNDSARAELYSELASGAETGWDYSSRWCRQPLLNLTDNNPALRTLNVKAIIPVDLNSLLAGDHALLANLYDLYSNSSSSNSTSNSSSISNSSSQAAYHRQAAQNLTAAILDLHWSPSKSFFYDFNTSSNSQSDIYTPASLFPLWQNITPPALVGNETAALQLVSGVRYLLGKYAGIPSVATLLATGLNWDFPNSWPPHVYTSIKAFQTLYRVNPNATVLSNLTLSFAQVQAGQLGLSETGFQIQPASTVGNTSLETAEAKGKPWPVALGIEYANRYMQSAFCSWYSTGGEISGVLTQLPLSDLNSTGTFTAGQTGVMFEKFNVTDPDAAGGGGEYTVQTGFGWTNGVVLWVAGEFGSLLPAPTCPLIPIIEISGSSNSSIYANGTVTNSTALYRGYKIPRK

SEQ ID NO: 197 - protein, 663 aa, Trichoderma asperellum
LYTNGSVIAPCDSPIYCHGDILQDIQLAHPFSDSKTFVDMPAKRPLREIQSAFNNLSKPLTNDSSLQVFLETYFADAGGELVEVPRSSLTTNPAFLNKINDTVIREFVTKVIDIWPDLTRRYSGAVGNCSTCPNSFIPVNRTFVVAGGRFREPYYWDSYWIIEGLLRTGGAFVGIAKNTIENFLDFIDRFGFIPNGARLYYLNRSQPPLLSQMVRIYIEHTNDTSILKRALPLLVKEHDFWIRNRTISVNIANKTYTLQQYAVQNTQPRPESFLEDYVTANNRSYYATSGIIYPENKHLNSTEMADLYANLATGAESGNDYTSRWLANPSDAINDVYFPLRSLNNKEIVPVDLNSILYGNELTISQFYNRTGDATAARAWAERAANRSAAIQAVFWNETLFSYFDYNLTSSSQYVYVPADKDTISLDRQTAPSGKQVFFHVGQFYPFWTGAAPDYVKNNPYAVTRAYDRVTGYLDAQPGGIPASNVQTGQQWDQPNVWPPHMHILMQGLNNVPATFTAQDPSYQDIQNLSLRLGQRYLDFTFCTWLATGGSTSETPKLHGLSDQDVGIMFEKYDDNSTNAAGGGGEYEVVEGFGWTNGVLLWTADTFGNKLKRPQCGNITAGHPAPASSSSKRSAVQLDAWDARRVKKFGKRTEGRVKRPFLF

SEQ ID NO: 198 - protein, 674 aa, Corynascus sepedonium
LYINGSVTAPCDSPIYCQGELLKAVELARPFVDSKTFVDMPTIKPVDEVLAAFSKLSLPLSNNSELNAFLYENFAQAGHELEEVPDSELETDAKFLDKLEDRTIKEFVGKVIDIWPDLTRRYAGPSNCTECANSFIPVNRTFVVAGGRFREGYYWDSYWIVEGLLRTGGAFTHISKNIIENFLDFVDTIGFIPNGARIYYLNRSQPPLLTLMVKSYVDYTNDTSILDRALPLLIKEHEFFMNNRTVSITGSNGKEYTLNRYHVENNQPRPESFREDYITANNGSYYASSGIIYPVKTPLNETEKAALYSNLATGAESGWDYTSRWLGVPSDAARDVYFPLRSLNVRDIVPVDLNSILYQNEVIIAEYLEKAGNSSAAKRFATAAEQRSEAMYSLMWNATHWSYFDYNLTDNTQHIFVPADEDTAPQDRIEAPPGQQVFFHIAQLYPFWTGAAPASLKANPLAVQQAYARVARMLDIKKGAIPATNYRTGQQWDQPNVWPPLQHILMKGLLNTPATFGKSDPAYQSVQNLALRLAQRYLDSTFCTWYATGGSTSDFPQLEGVTPGATGVMFEKYADNATNVAGTGGEYEVVEGFGWTNGVLIWAADVFGNKLKRPDCGNITAAHTHSSAKRGLEENKLPRRAVELDPWDAAWTKMFGRSKLRRREAEDVRKRWMS

SEQ ID NO: 199 - protein, 674 aa, Myceliophthora thermophila
LYINGSVTAPCDSPIYCHGELLKGVELAHPFVDSKTFVDMPTLKPVDEVLAAFSKLRQPLSNNSELNNFLAEYFAPAGHELEEVPKGELQIDPKFLNKLEDRTIKEFVSKVIDIWPDLTRRYAGPGDCSGCANSFIPVNRTFVVAGGRFREPYYWDSYWILEGLLRTGGAFTQISKNIIENFLDFIDTIGFIPNGARIYYLNRSQPPLLTRMVKSYVDYTNDTSILERALPLLIKEHDFFTNNRSVSVTASNGKTYTLHRYHVENNQPRPESYREDYITANNGSYYAASGIIYPVKTPLNETEKAVLYSNLASGAESGWDYTARWLRVPDDAARDVYFPLRSLNVREMVPVDLNSILYENEVIIAEYLEKAGNSSEAKRFASAAKQRSEAMYNLMWNATHWSYFDYNLTSNAQNIFVPADEDTASFDRYAAPPGQQVLFHVAQLYPFWTGAAPAHLKSNPLAVQKAYARVSRRLDTKKGAIAATNYRTGQQWDQPNVWPPLQHVLMQGLLNTPATFGESDPAYQGVQKLALRLAQRYLDSTFCTWYATGGSTSDFPQLQGVSPDATGIMFEKYADSATNVAGGGGEYEVVEGFGWTNGVLIWAADVFGNKLKRPDCGNITAAHTHSEAKRSLGDGGLARRAVELDPWDAAWTKMFGRSKLRRREAEDVRKRWSS

SEQ ID NO: 200 - protein, 661 aa, reesei GH37
LYINGSVIAPCDSPIYCHGDILREIELAHPFSDSKTFVDMPAKRPLSEIQTAFANLPKPLRNDSSLQTFLASYFADAGGELIQVPRANLTTNPTFLSKINDTVIEQFVTQVIDIWPDLTRRYAGDAAVKNCSSCPNSFIPVNRTFVVAGGRFREPYYWDSYWIVEGLLRTGGAFVGIARNTIDNFLDFIERFGFVPNGARLYYLNRSQPPLLSRMVKVYIDHTNDTAILRRALPLLVKEHEFWTRNRTVDVRVNNKTYVLNQYAVQNTQPRPESFREDFQTANNRSYYAASGIIYPATKPLNESQIEELYANLASGAESGNDYTARWLADPSDAMRDVYFPLRSLNNKDIVPVDLNSILYGNELAIAQFYNQTGNTTAAREWSSLAANRSASIQAVFWNETLFSYFDYNLTSSSQNIYVPLDKDAVALDRQTAPPGKQVLFHVGQFYPFWTGAAPEYLRNNPFAVTRIFDRVKSYLDTRPGGIPASNVNTGQQWDQPNVWPPHMHILMESLNSVPATFSEADPAYQDVRNLSLRLGQRYLDFTFCTWRATGGSTSETPKLQGLTDQDVGIMFEKYNDNSTNAAGGGGEYQVVEGFGWTNGVLLWTADTFGSQLKRPQCGNIMAGHPAPSKRSAVQLDMWDASRVKKFGRRAEGRMGTLHAW

SEQ ID NO: 201 - protein, 670 aa, Chaetomium virescens
LYINGSVTAPCDSPLYCQGEILKAIELARPFSDSKTFVDMPTIKPLEEVIAAFGRLKQPLSNNSELTAFLAENFAPAGGELEEVPKSELHTDPVFLNKLDDAVVKEFVGKVIDIWPDLTRRYAGPGNCSNCENSFIPVNRTFVVAGGRFREPYYWDSYWIVEGLLRTGGAFVGITKNILENFLDFIETIGFVPNGARIYYLNRSQPPLLTKMIKIYVDHTKDTSILQRALPLLIKEHEWWTNNRSVTVTGPNGKTYTLNRYHVNNNQPRPESFREDYITANNGSYYATSGIIYPVKSPLNETEKDETYANLATGAESGWDYTARWLRTPNDAAKDVYFPLRSLNVRNMIPVDLNSILYQNEVIIGEYLEQAGNKSEAQRWFQAANQRSEAMYALMWNATHWSYFDYNLTSNSQYIFIANDEDATTAEQANSPPGQQVLFSISQLYPFWTGAAPDQLKKNPLAVQQAYYRIERMLNEKAGAIPSTNFRTGQQWDEPNVWPPLQHILMQGLLNTPATFGTADPAYAAVQNLALRLAQRYLDSTFCTWYATGGSTSQTPQLQGVSPGATGIMFEKYADNATNVAGSGGEYEVVEGFGWTNGVLIWAAETFGNKLKRPDCGDIQAAHTHTDKKKRWSVDGEVRARERMAVELDPWDAKWTKMFGQAKGRVGRRS

SEQ ID NO: 202 - protein, 508 aa, Rhodothermus marinus
QDRVACQVPLPSVERIEAVRAYIRQSWDVLTRSHRDLLAAVQDPKIEHEPGTPWPLYIAATEDSVAVWHRLQQELPDSVLQQIVLRVLPEDPVAHLDEIHPHGLLYLPEPYVVPGGRFNEMYGWDSYFIVVGLLRDGRVDLAKAMTDNHLYQVRHYGKVLNANRTYYLTRSQPPFLSAMVLAVYAHTQDRDWLAAAVPLIERYYAYWTTPPHLAGETGLSRYYDLGEGPAPEVVAGERDAQGRTHYDRVREYYRMHEVTAYDESLYYVAEADSLTPLFYKGDRSMRESGFDPSNRFGPFSVDIIHYAPVGLNALLYRMETDLARIHEILGDTAAAAAWRARAEARRERVDRYLWDSERGLYFDYNFRTGRRSDYVFATTFYPLWVGMASPEQAARVAANLYLLEAPGGLLTSTHISGSQWDAPYGWAPLYLIAVEGLRRYGYDEAADRLTAKFVSMIVEDFERTGVILEKYDVVQRRSDVALRYGYTSNEIGFGWTNAVFAELLAQMD

SEQ ID NO: 203 - protein, 674 aa, Myceliophthora sepedonium
LYINGSVTAPCDSPIYCQGELLKAVELARPFVDSKTFVDMPTIKPVDEVLAAFSKLSLPLSNNSELNAFLYENFAQAGHELEEVPDSELETDAKFLDKLEDRTIKEFVGKVIDIWPDLTRRYAGPSNCTECANSFIPVNRTFVVAGGRFREPYYWDSYWIVEGLLRTGGAFTHISKNIIENFLDFVDTIGFIPNGARIYYLNRSQPPLLTLMVKSYVDYTNDTSILDRALPLLIKEHEFFMNNRTVSITGSNGKEYTLNRYHVENNQPRPESFREDYITANNGSYYASSGIIYPVKTPLNETEKAALYSNLATGAESGWDYTSRWLGVPSDAARDVYFPLRSLNVRDIVPVDLNSILYQNEVIIAEYLEKAGNSSAAKRFATAAEQRSEAMYSLMWNATHWSYFDYNLTDNTQHIFVPADEDTAPQDRIEAPPGQQVFFHIAQLYPFWTGAAPASLKANPLAVQQAYARVARMLDIKKGAIPATNYRTGQQWDQPNVWPPLQHILMKGLLNTPATFGKSDPAYQSVQNLALRLAQRYLDSTFCTWYATGGSTSDFPQLEGVTPGATGVMFEKYADNATNVAGGGGEYEVVEGFGWTNGVLIWAADVFGNKLKRPDCGNITAAHTHSSAKRGLEENKLPRRAVELDPWDAAWTKMFGRSKLRRREAEDVRKRWMS

SEQ ID NO: 204 - protein, 657 aa, Moelleriella libera
LHTNGSLIAPCDSPIYCYGDILKQVELARPFADSKTFVDMPGVKPLAEIQAAFDKLEKPLRNNTALQDFLKTYFADAGQELQEVPKSELKTDPQFLKTLNDTVIREFVTKVIDIWPDLTRSYKGSNTNCTDCPNSFIPINRTFVIAGGRFREPYYWDSYWILEGLLRTRGSFTQIAKNTLENFLDFVEQFGFVPNGARIYFLNRSQPPMLSQMVKLYIDHTNDTAILQRALPLLVKEHAWWMNNRTVDVQVGGKTYKLNRYAVSNTEPRPESYREDFETASNSSYYAQSGIIYPETKKLNDSQRAVLYANMATGGENGWDFSSRWIANPSDSVRDVYFPLRTNNAQNVVPVCLNSILYGNEMTIGGFFNSTGNTTAGQEWAAKAKARSEAMHATMWNETHFSYFDYNLTSSAQDVYTLADDDTSIYDNGTLTGAPPGYQVAFNGAQFYPFWQGAAPTYLKENPQAVKTAYARVAQYLKVRKGGIPATNLKAREQWDQPNVWPPLMHILMQGLLNTPPTFGSSDPSYKSVRSMALTLAQRYLDSTFCTWYATGGSTSETPKRPGLPEKDKGIMFEKYADNSIDIAGSGGEYEVVEGFGWTNGVLIWAADTFANELKRPDCGNGSSSSSTSSAAKRGLSAVELHPADASRIKRFGSSKG

SEQ ID NO: 205 - protein, 660 aa, Acremonium dichromosporum
IYVDGNITAPCDSPVYCYGEMLHQIQLAKPFDDSKTFVDMPALKPLSQIQAAFDRLDKPLSNNSALNNFLDEFFADAGGELSEVDKADLETDPVFLDKIDDEVVKEFTNKVIDIWPDLTRRYSGAAASNCTNCPSSFIPLNRTFVVAGGRFREPYYWDTYWIIEGLLRTGGSFTDISRDIIENFLDFVDQFGFVPNGARIYYLNRSQPPVLSRMVQAYIEHTNDTDILDRALPLLMKEHEFFSENRTIDIEGPNGTTYTLNRYDVRNNQPRPESYSEDYETATNTSYYSHDSGIIYPETEPLNDTERANLYSALASGAESGWDYSSRWIARPRDAAEDVYFPLRSLNTNNIVPVDLNSIMYANEMAIAGFLNQTGNASAAAEWEELAYNRSEAIHALMWNETYMSYFDYNLTSAAQHIYVPADDDVSTLESSTAPEGHMVLFSVSQFYPFWTGAAPSYIKNNPFAIAQIYKRVETLLDTRKGGIPATNFRTGQQWDQPSVWPPLMHILMAGLQNTPATFGEDDPAYQHVHEIALRIGQRYLDSTFCTWRATGGATSETPQLEGFTDRDVGIMFEKYADNSTNIAGGGGEYEVVEGFGWTNGVLIWTVDEFGNELKRPDCGDLEAADTTERRKRSALQLAPRDAQRTKKFGKRAVERQPWF

SEQ ID NO: 206 - protein, 667 aa, Fusarium sambucinum
LYVNGTVVAPCDSPIYCHGDILEQVELARPFSDSKTFVDMPAIRPLSEIQKAFDELDKPLRNNSALADFLSENFADAGNELEEVPEDELKTDPKFLDNINDTVIREFTEKVIDIWPDLTRRYDQDSKNCSDCPNSFIPVNRSFVVAGGRFREPYYWDSYWIIEGLLRTGGSFVNIAKNTIENFLDFIEEYGFVPNGARIYYLNRSQPPLLSQMVKIYIDHTNDTDILERALPLLVKEHEFFMKNRSVPVYINDETYMLNTYNVSNTQPRPESYREDYITATNKSYYSTSGEVYSGGEELSFKQKETLYGNLASGAESGLDYTSKWIARPENAIRDNYFPLRYLNTRNIIPVDLNSILYGNEIAIADFYEQTGNSSASEQWREVAANRSYAMHAFMWNETLWSYFDYNLTSKAQQIYFPADNNTVSVDTEDAPKGQQVFFSPTQFYPFWLGAAPDYLKNNPYAVLSAYKRVATYLDKREGGIPASNIETGQQWDQPNVWPPMMHILMAGLEKVPATFGIMDPSFIEIRKLALRLGQRYLDSTFCTWYATGGSTSETPKLESVSDKEDGIMFEKYADNATNTAGGGGEYEVVEGFGWTNGVLIWAVEEFGNRLTRPKCKNLETAHSSDKRDTSAVMLHARDAKHVKKFGRRKRAEEKAAKKRSSRLFHF

SEQ ID NO: 207 - protein, 660 aa, Phoma sp.
LYQNGSIIAPCDSPIYCYGDLLREIELAQPFSDSKTFVDLPTIRPLDEVLRAFNNLTKPIQNNTELNNFLTTYFGEAGSELDALPKDQLETQPDFLDNVNSSVIVNFTSQVIDIWPDLTRRYVGAGNCTGCVSSFIPVNRTFVVAGGRFREPYYWDSFWIIEGLLRTKGSFTQIAENIIENFMDLVEELGFVPNGARRYYENRSQPPLLTQMVRVYVEYTQNYTLLERALPVLEQEYEFWVNNRSVTLERGGKNYTLHHYNVSNTQPRPESYREDYITANNLTYYNENGEQFNASHPLNDTQKALLYAELASGAETGWDYSSRWLANPSDAVNDDFFPLRSLNVINTIPVDLNSILYYNEITIAEFHRREGNYCAARQWAELARNRSEAMTALLWNAEYYSYFDYNLTSSAQNIYTLADNTSTPLSLAGAPAGYQVGFQLSQLYPFWTGAAPDSIKGDPTAIRRAFARVEEALDTEAGAVSATNLFTGQQWDEPNVWPPLQYIAIQGLLNTPLEVSEDDDEQTAEDYVWTQNLALRLAQRYTDSLFCTWRSTGGATEEEPQLPGATGNGTIFEKYSDEAINARGGGGEYTVVEGFGWSNGVLIWAVDNFGQKLTTPDCGNITAAAPPSTASKRKRSAVEIHQRDAAWIKGTKENKMFGKK

SEQ ID NO: 208 - protein, 737 aa, Lentinus similis
LPQAVTPSSTSVSSQTVSTAVPSPTASLTSTLPSQIPLPPKQDWCPSEIFCAGELLQTVNVAQLYPDPKTFVDKPTARKSQQVVSNFQNIGGNSSNVTVGAIEDFVNSNFKGEGLELEPIAFANFNPTPAFLNNVSDPLVKAWSQIVHGYWTQLTRSTNDSALCPEGTESGSCESSLIPLNHTFVVPGGRFREQYYWDSYWIVQGLLVSELYDIVNDTLQNFMDELEHIGFIPNGGRIYYLNRSQPPLFIHMLTSYVQASGDTSILKRALPLAEKELAWWSANRSVQVKSPYTNATHNVYRYHVTNTAPRPESYYTDYITANDPTLQTPLTEQQRADLYAELATGAESGWDYSSRWLKEPLAGGSNNTSPALRSLNIRSLVPVDLNSILYKAHLNLAALYNNESHSAAASNHTQAAIALREAILDLHWDANKRAFYDFNITSNARNDIFSAATFYPLWSGIIPDEILSDGSGATAFGAFAAVNMVLNRYNGTFPVTFLETGLQWDAPNAWPPHQFIIIEALRNLPSNITNTPLPSAPSGNSTYALIPAGQVGIAEGDLPGQILSPGQNATKTGPAADINTLNGTVVNGGNATSGEGWAAVLQRELANRYIASALCSWHATGGEVPNLLPRLSDSQLQITQSQNNTGNMFEKFSINDIDSAGRGGEYTVQAGFGWTNGVVLYLTHVFGDKLVAPSCPNLVALSSNTATTSGAVAQMTLPSSLAVTVGAVVLGFVGLVL

SEQ ID NO: 209 - protein, 683 aa, Diaporthe nobilis
QTLDGIYYDGDNIAPCSSALYCYGDILDSIQRAKPFADSKTFVDMPTRVPLEEVRAAYDQLTKPLQNNTELLDFLSNNFGPAGQEVVPVDPGSLGVNASFLGGIANAVNREFTEAVIDLWPNLTRWVNESAVCAECDNSLLSIKRPFIVAGGRFREPYYWDSYWILHGLLRSGGNFTRIARNQIENFLDFVEDYGFVPNGARVYYLNRSQPPLLAQMVRIYIEQTGDATILDRAIPLLIREHDFFMSNRTVHVSVGSRNYTLNRYNVANTEPRPESYYEDYTQVNNASYYANDGRVFPTRNTTQAEKDLQYKNLASGAESGWDFSTRFMRDPTIAANDTYFPLASYNIINIIPVELNSILYWNEVTIAAFLRQQQQQVPNATAEADADAWDARAASRSEAMYSVMWNETLGGYFDFNLTSGSQDVFWARDADSLPTEQAGTEPGQQVVFNIGQLSPFWTGAAPRSLAGDPAAVRRAFSRVDEYLGSRKGGIAPTNFVSGQQWDQPSVWPPHMHILMEALLRTAEAGGESEGGSEDWAWAQDLALRLGQRYFDSAYCTWRATGGGTPSSPPLANPPQDLGGQMFEKYSDQSLNEAGSGGEYVVVVGFGWSNGVLIWVADTFRDRLQTPACGDLTTRGEAGKMREKRMSENGRHGDGSNAISAVKLDYFDAAWTSENVGGLHGVR

SEQ ID NO: 210 - protein, 763 aa, Solicoccozyma terricola
QGNSSMSASNATSSSTGTGTSSSAAAVMTAVPMPTAPLSSPVEMLPLPPVQPWCNGGENATYCPGSLMQLVQLSGIYNDSKTFPDKPTQYNASVTYQAFDALPVNATVGDVETFVEKYFKGEGQELETVQIQNFTQNPTFLNVIDDELYKGFVSTVNGYWSLLVRQTNESALCTNGACESSLIPLNRSFIVPGGRYREIYYWDSFWILEGLLKSELYLYAYNLLENFMDLIEKFGFLPNGGRSYYLNRSQPPVFVQMLNAYIQVTGNVSILTRALPIAETELQWWRTNRTISVTSPYTGTNYSVARYFVTNSAPRPEGYVEDITTAFGGNPALNESARSALYAELASGAETGWDYSSRWCKQPLLNLTDNDPALRTLNVRQQIPVDLNSLLCGDHVLLANLYEFYMNSTIGGGSGISSGGGNSTIGMGAWANSTSGSNMTSNSTSSSNMTGLVQSHRMIAKEFEAAINDLMWDKQKLWWYDFNMTANARADVYHPGGLFPLWQNITPSDIVGNDTAAFGVFAGVRYMVGMYPGPPAPASLIQTGLNWDAPNVWPPHVYTGIKALETVLRINPNSSVVPNITLTDFTRIPTGQLGLNQSQLPPQPASALGNGTADLDQAIAQMQKGKPWPTALAIEFANRYLQSAFCSWYSTGGSIPGLLQQLSPQELNLTGSLTTGSQAMGNIFEKFNLTNVDAAGGGGEYTVQIGFGWSNGVILHTAGEYGQYLVQPSCPLIAIHETANATSTNATKSNNTMVFSGYRLPHD

SEQ ID NO: 211 - protein, 734 aa, Dioszegia cryoxerica
QSSSSSSFSPTPVTTAVPSATAALNQTVSGQGVYPPLQPWCNAGENATYCPGVILQDVQLSGLFPDSKTFVDKPTNGTQNATQQAFQQLGNNITLGQLAQFVNTSFRGEGLELSQVPINGFVANPAAVNKVSNPLYRGWVSTVNSYWSLLIRETNQSAVCTTQCESSLIPLNYTIVVPGGRYREIYYWDTFWILEGLLKSELYTYAWDVLQNFMDFVDVYGFIPNGGRKYYLNRSQPPVFIQMLDAYVKATGNVTILERALPLASEEMRWWINNRTTQVTSPFTGITRRVYVFNVTNSAPRPEGYVEDYEAAFGAQPPLTEAQRGALYAELATGAESGWDYSSRWCKQPVINVTDNLPALRTLNGRSIVPVDLNSLQAGNHALLARLYEVYINASTTSNTTAAQTIRANATQEIALHKTLANDYSQAVLDLHWDPARAWFYDFNLTSNSRESLYTPAGTFALWQNITPPGLEGNDTAALRIASGARYLLGRYGGIQGVSSLLVTGLNWDFPNSWPPHTYTSIKAFQTLGRLVGNASIVGNATIPFSQVATNQLGLNETQLPPQDPALQGNASLTVPSARNVSWPLALEIEYASRYMQGAFCSWYSTGGSISGLLTQLPVSQLNATGTYQAGQTGQMFEKFNATDIDAAGGGGEYTVQIGFGWTNGVVLWLADNFGQYLPQPTCPLVVLSLTNLNSTTAGNSTNGTSPAAPGNATSLVAVSELQGIWEGQRVSRD

SEQ ID NO: 212 - protein, 1020 aa, Talaromyces funiculosus
LPFNERVDQVLRSYEVTSKLDSRSTKPSKHGHTYQTQFLGVTWDQRNWRLQSTVLDQGHYESRGSIANGYIGLNVAGAGPLFELDSPVDGDVINGWPLFSRRQTFAGLAGFYDLQPRTNGTNFPWLSQYGDDSAISGVPHWGGMVLDLGDGEYLDATVDNSTISDYTTTYDYKAGVLSWDYKWTPKNANGSFGISYKIFANKLDVNQAVVQLSITPSTNGSASVVNVIDGYAAVRTDFVSSGNESDVVYTAVKPNGVTNVTAWIYTALDGDDAFDISSAALVNDKPYVHQNDSSIAQSVNVTFTAGTTITINKFVGAASTDAFPDPQSTAREAALSARRRGFDDLFRSHISEWAQVMPDDSVDDFTLANGTLPNDTFIIESAVMAVVNPYYLLQNTVGPNALRRVNNAPVNDWSIPVGGLTSDSYAGQIFWDADVWMQPGLVAAFPESAKRITNYRAAKYSQALENAKTAYTSSQNQTWFSPDAAIYSWTSGRVGNCTATGPCWDYEYHLNGDIGISLVNEWVVSGDNETFKNKHFPIYNSIATLYGDLLKKNGSYYTLTNMTDPDEYANNVDAGGYTMTLISQTLSNANAFRKQFGMNENTTWTEMADNILLIRENDVTLEYTTMNNSVAVKQADVILSTFPLDYTKNYTTSAALNDLDYYALKQSPDGPGMTYAIFSIVANDVSPSGCSAYTYAQYSYDPYIRGPFFQFSEQLLDDYTINGGTHPAFPFLTGHGGANQVVLYGYLGLRLLPDDMLHIDPNLPPQIPSIKYRTFYWRGWPIQAASNYTHTTIQRATTVAPLSTADPTYANKSIHVSVGHNTVNSTTYSLSANGSALVVPNRQIGSINTVAGNVVQCKSVLSTDAYQKGQYPISAVDGAASTKWQPEFAANISSLTVDLTGSNVSSVSGFYFDWAQAPPTNITVLLHNSSSAALASSGDKPGSSAVTLNITISNPYNASTYNANIIALPSSNSTNYTFPAPVPKPRYATLFVQGNQALDETDTKSGNGTGATVAEWAILS

SEQ ID NO: 213 - protein, 1063 aa, Hamigera avellanea
ASPKSRINQCLKKHAGQGSHDDETSSNVYQTRFPGVTWDEDNWSLTTSVLDQGHYQSRGSVANGYLGINVASVGPFFELDIPLNGDVINGWPLYSRRQTFATISGFFDSQPETNGTNFGWLNQYGGESVISGVPHWSGLILDLGDGTYLDSTVDNATLSGFTSSYDFKAGVLSWSYQWTPEGKHGSYDITYRLFTNKLYVNQAVVDMEIVPTVAGKASVVNVIEGSSAVRTDFVESGEDDGAIFSAVRPWGISNVTAYFYANLTVSDNVDLSSRTLVSNKPYVSTNESSIAQSVDVQFIPGKSVRITKFVGAASTDAFANPQETAKRAASTAQTNGYLKSLNSHIAEWASVMPDDSVEDFSLPETGKLPADEHIIESAIISVTNTYYLLQNTVGKNAIKASSDAALNMDSISVGGLTSDSYAGLIFWDADIWMQPGLVASHPEAAEVFTNYRVAKYPQAVKNIETAFASSKNQTNFSPSAAAYPWTSGRYGNCTGTGPCFDYQYHLNGDIGLSMINQWVVSGDTQTFREKHFPIYDSAATFFSNLVERNGSTWTLTNMTDPDEYANHIDAGGYTMPLIAETLLYANSFRKQFGVEPNETWNEIAENVLVLRTNGVTLEFTSMNGSAPVKQADVVLVTYPLDYNNNYSPEDSLNDLDYYANKQSEDGPAMTWAIFSVVANEASPSGCSAYTYAQYAYYPYARAPFFQLSEQMIDDASINGGTHPAYPFLTGHGGANQVNLMGYLGLRLLPDNVIHVDPNLPPQIPHLKYRTFYWRGWPMSAASNYTHTTIQRAVNVPALSTADQKFANVSIPVHVGPETNATVYRLPVNGTLTIPNRQIASKNTVAGNLIQCRPVESQNDFQPGQFPISVVDGASSTRWQPKHADNVSAVTVTFADEEVGSLVSGFYFDWAQAPPVDAAVIFHNSSLENPASAFSFASNSSSSEYSVITTLKNVEQSDPYDPESDKLDIIAIPTGNTTKVTLPSAVPAARYATLFITGNQALGPEDIAAKNGTGATVAEWAIVGQTSSATSKRSIQTRKLQVRSGAALSGLGFAQRRRQSAEMY

SEQ ID NO: 214 - protein, 1020 aa, Talaromyces ruber
LPFNERVDHVLRSHDLTSRLHSRSAKPSNHGGTYQTQFTGVTWDQRNWRLQSNVLDQGHYESRGSIANGYIGLNVAGAGPFFELDTAVDGDVINGWPLFSRRQTFAGLAGFYDLQPTTNGSNFPWLDQYGDDSVISGVPHWGGLVLDLGNGEYLDATVDNSTISDYSTTYDYKAGVLSWHYKWTPKNANGSFEIKYKIFANKLDVNQAVVQLSITPSANGSASVANVIDGYSAVRTEFVASGNESDAIFTAVKPVGVSNVTAWIYAALDGDDAFDFSSATLVNDKPYVHQNDSSIAQSVNVTFTAGTTITINKFVGAASTDAFPDPQSTAREAALKARRRGFDDLFRSHISEWAQVMPDDSVDDFTLANGTLPNDPFIIESAVMAVVNPYYLLQNTVGPNALRRVNNAPVNDWSIPVGGLTSDSYAGQVFWDADVWMQPGLVAAFPESAKRITNYRTAIYSQALENAKTAYTSSQNQTSFSSDAAIYSWTSGRYGNCTATGPCWDYEYHLNGDIGISLVNQWVVSGDNDTFKNTHFPIYNSIATLYGDLLKKNGSYYTLTNMTDPDEYANNVDAGGYTMTLISQTLSNANAFRKQFGMDENTTWTDMADNVLLIRENDVTLEYTTMNNSVAVKQADVILSTYPLDYTKNYTTSAALNDLDYYALKQSPDGPGMTYAIFSIVANDVSPSGCSAYTYAQYSYDPYIRGPFFQFSEQLLDDYTANGGTHPAFPFLTGHGGANQVVLYGYLGLRLLPDNVLHIDPNLPPQIPSVKYRTFYWRGWPIQAASNYTHTTIQRATSVAPLSTADQTYANRSISVQVGQNTVNSTTYSLPANGSAIVVPNRQIGSINTVAGNIAQCKSVLSTDAYQPGQYPISAVDGAASTKWQPEFAANISSLTVDLTSSNASTVSGFYFDWAQAPPTNITVLLHNSSNAPLTSSNSNGGNSTVSLNVTISNPYDASAYNANVITLSSSNTTNYTFPAPVSKPRYATLFVQGNQALDETDLKAGNGTGATVAEWAVLS

SEQ ID NO: 215 - protein, 1055 aa, Trichoderma lixii
ATSNNRVSECLGRNGGSSTGVHFSKNVYKTDFAGVTWDEDNWLLSTTELKQGAFESRGSIANGYLGINVASVGPFFELDTEENGDVISGWPLFSRRQSFATIAGFWDSQPVMNGTNFPWISQYGSDTAISGIPHWSGLILDLGGNTYLDATVDNRTISNFRSTYDYKAGVLSWSYKWTPKGNKGSFDISYRIFANKLYVNQAVVDLQVTASKNVEASIVNVIDGFAAVRTDFVESGEDGNAIFSAVRPNGVANVTAYVYADITGSGGVDLSSRKIVHNKPYVHANASSIAQAVPVKFSAGRAVRVTKFVGGASSDAFKNPKQIAKSAAATALKNGYSKSLNSHVTEWAAVMPESSVDSFADPKTGKLPNDNYIIDSAIIAVVNTYYLLQNTVGKNGSKAANGAPVNVDSISVGGLTSDSYAGQVFWDADLWMQPGLLAAHPEAAERIINYRLARYGQAKENVKTSYAGSQNETFFSASAAVFPWTSGRYGNCTATGPCWDYEYHLNGDIGLALVNQWVVNGDTKDFEKNLFPVYDSIAQLYGNLLKPNGTAWTLTNMTDPDEYANHVDAGGYTMPFIAETLQNANTFRKQFGIEQNKTWNDMASNALVLRENGVTLEFTTMNGSAVVKQADVIMVTFPLSYTTNYTTEDALNDLDYYANKQSPDGPAMTYAFFSIVANEISPSGCSAYTYAQYAFKPYVRAPFYQLSEQIIDDSSINGGTHPAYPFLTGHGGANQVVLFGYLGLRLVPDDFIHIEPNLPPQIPYLRYRTFYWRGWPISAWSNYTHTTISRASGVAALDGADQRFAGKTITIHSGPEESPKAYHLPVKGSVVVPNKQIGSQQTYAGNLVQCHAASSPSDYVPGQFPIAAVDGATSTKWQPASADKLSSITVSLDQEDVGSLVSGFHFDWAQAPPVNATIIFHNEAINDPATVLKSQKHNSNYKVVSSLTNIKQSNPYIKTTDLDIIAIPIGNTTNVTLSQPVAASRYASLVIVGNQGLDHADVVGKNGTGATVAEWAIIGHSKGHTGAPGHHGKRKLNLRAAAAMSDPDSFARRRQ

SEQ ID NO: 216 - protein, 1056 aa, Aspergillus cervinus
STFSHKNDRILKGLKRHGDHYSRKSNTNSTDVYQTKFDGVTWDDDNWLLTTTALDQGDFRSRGSIANGYLGINVASVGPFFELDTAENGDVISGWPLFSRRQTFATIAGFFDSQPTTNGSNFPWLYQYGGDSVISGVPHWSGLVLDLGNDTYLDSTVDNQTIENFTSMYDYKSGVLSWSYTWVPAGNKGSFDIVYRLFAHKLNVNQAVVDMEITPSLSFNATVVNILDGYSAVRTDFVESGNDNGAIFTAVRPWGISNVTAYVYANLTGTPNVDLSSRTIVANKPYVHTNASSIAQAVNVSCSPNETVRITKFVGAASSDAFENPQETARQAVSAAIGAGYLRSLGTHIAEWASIFPDDSVDRFTDPATGKLPANKHIINSAIIAVTNTYYLLQNTVGKNAIQAVSGAPVNIDSISVGGLTSDSYAGQVFWDADVWMQPGLAASHPEAAQRITNFRAAKYPQALANIETAFTSSKNQTSFSPSAAAFPWTSGRFGNCTATGPCWDYEYHLNGDIGLSLMYQWIASGDTQTFRETHFPIYDSIATMYSNIVERNGSYWTLKNMTDPDEYANQIDAGGFTMPLISQTLNYANAFRQQFGLDVNQTWSEIANNVLVLNDNGVTLEYTTMNGSTVVKQADVVLDTYPLVYSNNYTSQNSLDDLDYYANQQSPDGPAMTWAIFSIVANDVSPSGCSAFTYHQYSYDPYARAPFFQLSEQLIDDASTNGGTHPAFPFLTGHGGANQVVIFGYLGLRLLPDEAIHIDPNLPPQIPHVAYRTFYWRGWPISAQSNSTHTTISRAMNASPLDTADSRFANVSIPIYVGTESNATVFQLPPTGPLTILNRQNGFNNTIPGNVAQCRPVYSPDDYAPGQFPIAAVDGATSTRWQPSSANTSSVTVTLPDTQINSPVSGFYFNWWQLPPVNATVIFHDDLLENPAATISSSGNSSSYRVVMTLTNIQQSSPYNAQIAALDEITIPTGNTTTVQLTNHAQTSRYATLLISGNQGLGDTQDGVGATVAEWVILGQGQGSSSSNSNGKRKLGARSAAALSNGWTERRRRLI

SEQ ID NO: 217 - protein, 1053 aa, Rasamsonia brevistipitata
LRSEARVAQVVRAYSSSTGVEAGHGNATQYETRFPGVTWDQRHWRLKSTVLDQGHFQSRGSIANGYVGINVASAGPFFELDTPVDGDVINGWPLFSRRQTFATIAGFYDEQPRTNGSNFDWLYQDGGESVISGVPHWSGLILDLGDGTYLDATVDDSTISDYSTVYDYKAGILSWSYKWTPKSSKGSFKISYRLFAHKLNINQAVVRMEITPSADTDATVVNVLDGYSAVRTDFVGSGKDGDAVYSAVSPWEVQNVTAYVYAVLDGSDGVDLSTLSLVNGKPYVHTNESSIAQSVNVRFRAGKTVTVTKFVGAASTDAFPDPQQTAREAALAAKEEGYDALLRSHVAEWAAVMPEESVDDFTYHNGTLPGDDFIVESAIMAVVNPYYLLQNTVGENALREVSHAPVNEWSISVGGLTSDSYAGLIFWDADLWMHPGLAVAFPQAATRITNYRVAKYEQARQNAKTSFTGSKNQTWFSDSAAVYPWTSGRYGNCTGTGPCWDYEYHLNGDIGLSLINEWVASGDTKTFQESYFPIYDSIATLYADLLQQNGSHWTLTNMTDPDEYANAVDAGGYTMPLIAQTLLYANSFRQQFGAQPNSTWTEMASNILFLRENDITLEYTTMNNSVQVKQADVVLVTYPLEYTTNYNAGNALTDLDYYALKQSPDGPAMTYAIFSIVANEVSPSGCSVYTYAQYSYDPYVRPPFFQLSEQLVDDYTLNGGTHPAYPFLTGHGGANQVVIFGYLGLRLLPDNVIHIDPNLPPQIPQVKYRTFYWRGWPIQAYSNYTHTTIGRAADVLALDTADQRFANTTIPVQVGSGSNATVYQLPIDGVLTVANRQVASTNTVAGNLAQCQPVDSSDSYVPGQYPLAAVDGAASTKWQPSFAANVSSVTVSLPESESGTLVSGFYFDWAQAPPVNATVVFHNNTVENPTRYMSSPTFVTHIDNITLSSPYNAEANPAATILLPSSNTTNVTLAHPMPVPRYATLFITGNQALSESEVQAQNGTGATVAEWAILASNPETGSSKRNLQLRGVGRSALAGLPRRANRKERRTDV

SEQ ID NO: 218 - protein, 1034 aa, Acremonium curvulum
LEERVSQTLNRHGVRSSYNRRADNGDQNRISNTSHPYIYQTSFEGVTWDSRNWRLQGTVLDQGHYQSRGSIANGYFGINVASAGPFFELDTPVDGDVINGWPLFSRRQTFAGLAGFWATQPTTNGTNFPWLYQYGDESPISGIPHWGGLVLDLGDDVYLDATVDNKTIKNYRTTFDYKAGVLTWDYTWSPKKRGSGSFDITYSLFANKLDINQAAVRLSIRPSRDTKAKVVNVLEGYAAVRTDFVDSGKDGDAIYSAVRPVGVNNVTAYVYAVLDADSAVDLSSAKVIDDAPYLYTNKSTIAQSVNVEFKANQNVTITKFVGIASTDAFPKPRDVAKQAAFAGKRRGYDDALRSHVSEWAQVMPDDSVDDFSSDNGTLPDDGFIIESSIMAVVNPFYLLQNTVGANALRRVNNAAVNDYSISVGGLTSDSYAGLVFWDADIWMQPGLAAAFPEAAQRITNYRVALYPQAKRNIKTAFQSSKNKTRFSDDAALYPWTSGRWGNCTASGPCFDYEYHLNGDIGIAFVNEWITSGDEKAFEEKYFPIYDSIATAFANLLQKNGTQWTLTNMTDPDEYANHVDAGGFTMPLISQTLTYANLFRKKFGKEENDTWADMAENVLILRENDVTLEYTAMNNSVEVKQADVVLNTFPLDYTRDYAPSAALNDLDYYALKQSPDGPAMTYAIFSIVANEVSPSGCSAYTYAQYSYSPYLRGPFHQLSEQLTDDFTTNGGTHPAYPFLTGHGGANQVVLFGYLGLRIVPDDKIHVDPNLPPQIPQVKYRTFYWHGWPIAAKSNYTHTTISRATTIKELDTANKKYANASIQVVVGSGKSAKTYKLPANGSSIVVANRKIGTVNTLEGNMIQCQPAQSFDTFVPGQFPISINDGAASTKWQPEFANNISAVTVTVPASKSKKISGFYFDWAQAPPTNATVVLHDEKMDNPTMVLLPVSKDDDKKGSVARVNVTISEPWSAKDKSNFVIGLQGGNTTNFTFSEPVAAKRYATLFIQGNQALDKVDIKYKNGTGATVAEWGILSDDA

SEQ ID NO: 219 - protein, 1015 aa, Talaromyces piceae
ARVDQVLQARDTHHPSLHSSSSYQTRFDGVTWDQRNWRLQSRVLDQGHYQSRGSVANGYLGINVASAGPFFELDTPVDGDVINGWPLFSRRQTFAGLAGFYDRQPTTNSTNYGWLNQYGDESVISGIPHWSGLVLDLGDGHYLDATVDSSTISDYTTTYDFKAGVLSWDYNWAPRQHGGGNSSFHISYQLFAHKLDINQAVVKLSITPSASGNASVVNVIDGYSAVRTEFVKSGTDGDAVYSAVSPVGVSNVTAWVYTVLDGDEAFNLSSAQLVTGKPYVYQNDSSIAQSVNVEFRAGETVTITKFVGAASTDAFADPRQTARDAALLAKKKGFDDLLRSHVSEWAQVMPDGSVDDFTREDGTLPDDEFIIESAVTAVVNPFYLLQNTVGKNALQRVSNAPVNDWSIPVGGLSSDSYAGLIFWDADVWMQPGLVAAFPESAQRITNYRAAMYRQARANIQSAFASSQNKTVFSPDGAIYPWTSGRYGNCTGTGPCFDYEYHLNGDIAISLVNQWVVSGDTETFKNEHFPIYDSIATMYADVLKKNGSFYTLTNMTDPDEYANNKDAGGFTMPLIAKTLLNANDFRKQFNMEENSTWNEKAASVQILRENDVTLEYTTMNNSVAVKQADVVLMTFPLDYTANYSSSSALNDLDYYALKQSPDGPGMTYAIFSIVANQVSPSGCSAYTYAQYSYYPYARAPFFQLSEQLLDDYTANGGTHPAYPFLTGHGGANQVVLYGYLGLRLVPDETLYIDPNLPPQIPQVKYRTFYWRGWPIQAASNYTHTTIRRATTVAPLDTADEKYTDEAITLHVGQQSDGNKYQLPADGTPVTVANRRVSSVNTVKGNMIQCQPVQSTASIQPGQFPIAAVDGAASTKWQPEFAANASSLTVEIPSSGKKRKTVSGFFFDWAEAPPTNATVVLHNNPVSEPTLSSFEAGKDGVVLRAFDIEISSPYNASTYADEIIIPQGNSTNYTFSHPVPAPRFATLFVQGNQALDKVDVENKNGTGPMVAEWVILE

SEQ ID NO: 220 - protein, 1022 aa, Penicillium sp.
LPLEERVDRVLRSYSVGSGLEARHSKYTYQTQFDGVTWDQQNWRLESTVLDQGHYSSRGSIANGYIGLNVAGAGPFFELDAPVDGDVINGWPLFSRRQTFAGLSGFYDVQPTTNGSNYPWLDQYGYDSVISGIPHWGGLVLDLGNGDYLDATVDNSTISDYTTTFDYKAGVLSWDYNWTPKNTSFGISYKIFSSKLDINQAVVQLSITPSANGTASVANVIDGYAAVRTEFVTSGNDSDALFTAVKPTGINNVTAWIYAVLDGDDAFDFSSATLVNNKPYINQNDSSIAQAVDVEFTADSTVTITKFVGAASTDAFADPQKTAKDAALAARIKGFEDLLRSHVSEWAQVMPDDSVDDFSLADGTLPDDIFIIESSVMAVVNPYYLLQNTVGENALRRVNDAPVNIWSIPVGGLTSDSYAGQIFWDADLWMQPGLVAAFPESAKRISNYRVAKYPEALANTNTSFAGSQNHTTFSSDAAIYSWTSGRYGNCTATGPCWDYEYHLNGDIGISLVNQWVTSGDTETFQNDLFPIYNSVATLYADLLKLNGSYYTLTNMTDPDEYANNVDAGGYTMTLISKTLSNANAFRKHFGLDQNSTWTEMAENVLVIRENDVTLEYTTMNNSVAVKQADVVLSTFPLDYTMNYTTSDAVNDLDYYALKQASDGPGMTYAIFSIVADKVSKSGCSAYTYAQYSFDPYIRSPFFQFSEQLDDDYTTNGGTHPAFPFLTGHGGANQVVLYGYLGLRLLPDNVLHIDPNLPPQIPSVKYRTFYWHGWPIQANSNYTHTTIRRATTTAPLSTADQTYSNTSITVQVGTSNGTTYSLRVDGTPLTIKNRRIGSVQTISGNIAQCQPVQSPDSYEPGQYPLSVVDGASSTKWQPESAANISSVTVTLGSSYSPGNSSNATASSILGFYFNWAQAPPDNITVVLHNASIPYLNASLSSLSNTTTTTSLNITVSNPYDSSADEKIIVLPSSNTTNYTFPSPVPVPRFATLFIQGNQGLDQTDLEYGNGTGATVAEWAILSA

SEQ ID NO: 221 - protein, 1020 aa, Talaromyces aurantiacus
LPFQDRVDQVLRSYSAKTLDIRSAKSSSKHGNTYETQFPGVTWDQRNWRLQSTVLDQGHYESRGSIANGYIGLNVAGAGPFFELDTPVDGDVINGWPLFSRRQTFAGLAGFYDLQPTTNGSNFPWLDQYGDDSAISGVPHWGGLVLDLGDGQYLDATVDNSTVSDYKTTYDFKAGVLSWDYKWTPKSSNVSFGISYKVFANKLDVNQAVVQLSITPSANGSASVVNVIDGYSAVRTDFVSSGNESDAIYTAVKPLGVSNVTAWIYATLDGDDAFDFSSATIVNNKPYVHQNDSSIAQSVNVTFTAGTTVTINKFVGAASTDAFPDPRSTAKEAALAGRRRGYDDSFRAHISEWAQVMPDDSVDDFTLANGTLPNDTFIIESAVMAVVNPYYLLQNTVGPNALRRVNNAPVNDWSISVGGLTSDSYAGQVFWDADVWMQPGLVAAFPESAKRITNYRAAIYSQALANAKTAYTSSQNQTSFSSDAAIYSWTSGRYGNCTATGPCWDYEYHLNGDIGISLVNQWVASGDNETFKNTHFPIYNSIATLYGDLLKKNGSYYTLTNMTDPDEYANNVDAGGYTMTLISQTLSNANAFRKQFGMDENTTWTEMADNVLLIRENDITLEYTTMNNSVAVKQADVILSTYPLDYTKNYTTSAALNDLDYYALKQSPDGPGMTYAIFSIVANDVSPSGCSAYTYAQYSYDPYIRGPFFQFSEQLLDDYTANGGTHPAFPFLTGHGGANQVVLYGYLGLRLVPDDKLHIDPNLPPQIPSVKYRTFYWRGWPIQAASNYTHTTIQRATRVAPLSTADMTYANKSISVQVGQNTANSTTYSLPVNGSALVISNRQIGSINTVQGNIAQCKSVQSMNGYQPGQYPISAVDGAASTKWQPEFAANVSSLTVDLTSSNASSVSGFYFDWAQAPPVNVTVVLHNSTSASLTSSAAQNGSSTVSLNITISNPYNASSYDANVIELSSSNTTNYRFPAPVPKPRYATLFVQGSQALDETDMKAGNGTGATVAEWAILS

SEQ ID NO: 222 - protein, 1016 aa, Talaromyces pinophilus
LPFNERVDQVLRSYSPKNLESRSTKHGNSYQTQFSGVTWDQRNWRLQSTVLDQGHYESRGSIANGYIGLNVAGAGPFFELDTAVDGDVINGWPLFSRRQTFAGLAGFYDLQPTTNGSNFPWLSQYGDDSAISGVPHWGGLILDLGDGEYLDATVDNSTISDYTTTYDYKAGVLSWDYKWTPKNSKASFGINYKIFANKLDVNQAVVQLSITPSANGSGSVVNVIDGYSAVRTDFVSSGNESDVIYTAVKPVGVNNVTAWIYAALDGDEAFDFSSAELVNDKPYVHQNDSSIAQSVNVAFTAGTTITINKFVGAASTDAFPDPQSTAREAAMTARRRGFDDLFRSHVSEWAQVMPDDSVDDFTLANGTLPNDTFIIESAVMAVVNPYYLLQNTVGANALRRVNNAPVNDWSIPVGGLTSDSYAGQIFWDADVWMQPGLVAAFPESAKRITNYRTAKYSQALENAKTAYTSSQNQTSFSSDAAIYSWTSGRYGNCTATGPCWDYEYHLNGDIGISLVNQWVVSGDNETFKNTHFPIYNSIATLYGDLLKKNGSYYTLTNMTDPDEYANNVDAGGYTMTLISQTLSNANAFRKQFGMDENTTWTEMADNILLIRENDVTLEYTTMNNSVAVKQADVILSTFPLDYTKNYTTSAALNDLDYYALKQSPDGPGMTYAIFSIVANDVSPSGCSAYTYAQYSYDPYIRGPFFQFSEQLLDDYTANGGTHPAFPFLTGHGGANQVVLYGYLGLRLLPDDMLHIDPNLPPQIPSVKYRTFYWRGWPIQAASNYTHTTIQRATSVAPLSTADPAYANTSISVSVGQNTANSTTYSLPVNGSAIVVPNRQIGSINTVAGNIAQCVSVLSTDAYQPGQYPISAVDGAASTKWQPEFAANVSSLTVDLTSSNASSVSGFYFDWAQAPPTNITVLLHNSSSAALTSSSTHGGSSSVSLNITISNPYDASSYDANVIALSSSNTTNYTFSAPVAKPRYATLFVQGNQALDETDTKAGNGTGATVAEWAILS

SEQ ID NO: 223 - protein, 1069 aa, Talaromyces leycettanus
TSANARINRCVKKHAGGKTPSGPSNNTYQTRFPGVTWDQDNWCLSTTTLDQGHYESRGSVANGYLGINVASVGPFFEFDTPVDGDVINGWPLFDRRMSFATISGFWDQQPTTNGSNFPWLYQYGGESVISGVPHWSGLILDLGDNTYLDATVDSRTISGFSTTYDFKSGVLSWSYQWTPAGNMGSYNITYRLFAHKLYVNQAVVDMEVVSSTEAKATVVNVIDGASAVRTDFVESGQDDGAIYTAVRPWGIANVTAYIYANITGSDNVDMRSRALVTNKPYVNGNASSITQAVNVHFTPGKSVRITKFVGGASSDAFSNPQQIAKQACSTAQANGYVKSLRSHVAEWASVMPDDSVDDFTFPSNGTLPADEYIIESQIISVANTYYLLQNTVGKNAINASSSTELNKDSIAVGGLTSESYAGMIFWDADVWMQPGLVASHPEAAQRITNYRVAKYPQAKANVATAYQSSKNQTNFSPDAAVYSWTSARYGNCTATGPCWDYEYHLNGDIGLSIINQYVASGDTQTFKEKLFPVFDSVATLYSNIVQKNGSSWTLTNMTDPDEYANQVDAGGYTMPLIAQTLLYANSFRQQFGLETNDTWNEIAQDVLVIRENGVTLEFTTMNGSAVVKQADVVLDTYPLGYTHNYGPTDALNDLDYYANRQSPDGPAMTWAIFSVVANQISPSGCSAYTYAQYAFSPYARAPFYQLSEQLIDDASLNGGTHPAYPFLTGHGGALQVNLFGYLGFRYLPDNVIHIDPNLPPQIPHITYRTFYWRGWPITAASTYTHTTLSRAWNVSSLDSADPKFANASIPVHVGLESNVTVYRLPVNGTLTVPNRMVGSKNTLAGNMVQCRPVQSMDGYQPGQFPISVVDGASSTKWQPLYSANVSSVTVTLSSSAVGKSVNGFYFDWAQNPPVNAAVVFHNSSFAQNPATTFSFDNPSASGNLYSVVSVLKDIQLSDPYDPATTDLDVIAIPKGNTTNVTLSSPVPAARYATLFIQGNQANSPAEVAAKNGTGATVAEWAILGQEVQNNGYGDQIEARRLDVRGAAALSGMGSFTQRRKRKMILPRFD

SEQ ID NO: 224 - protein, 1016 aa, Talaromyces variabilis
ALSPGARVNQVLRAHNSLPPSLTDNSTGSSYKTRFDGVTWDQRNWRLQSRVLDQGHYEARGSVANGYIGINVASAGPFFELDTPVDGDVINGWPLFSRRQTFAGLAGFYDLQPTTNSTNYGWLNQYGDESVISGIPHWAGLVLDLGNGDYLDATVDNSTISDYTTTYDYKAGILSWDYKWTPRQNSSSFRISYQLFANKLDINQAVVKLSITPSKSGNASVVNVIDGYSAVRTDFVKSGSDGNAIYTAVSPVGVSNVTAWVYAVLDGDKAFDLSSPSRVTGKPYIHQNESSIAQAVNVEFSAGKTVTIAKFVGAASTDAFSNPQKKAKTAALDGKKKGFEDLLRSHVSEWAQVMPDDSVDDFTLANGTLPDDSFIIEQAVTAVVNPYYLLQNTVGKNALQRVNNAPVNDWSIPVGGLSSDSYAGMIFWDADVWMQPGLVAAFPESAKRITNYRAAKYQQAIANVKTAYSSSQNETVFSPNAAIFPWTSGRYGNCTGTGPCWDYEYHLNGDIAISLVNQWVVSGDTETFQNEHFPIYNSIATVYGDLLKKNGSYYTLTNMTDPDEYANNKDAGGYTMPLIANTLIKANEFRRQFGMAENATWNEMAENVLIIRENDVTLEYTTMNNSVAVKQADVVLRTFPLDYTTNYSSSAALNDLDYYALKQSPDGPGMTYAIFSIVANEVSPSGCSAYTYAQYSYDPYARAPFFQLSEQLIDDYTTNGGTHPAYPFLTGHGGANQVVLYGYLGLRLVADEILHIDPNLPPQIPQVTYRTFYWRGWPIQAASNYTHTTIHRATTVAPLDSAEKKYAKSAISVQVGQQANSTTYKLPADGTPLTVANRKVGSTNTIKGNIAQCQSVQSVDSYQPGQYALAAVDGAASTKWQPEFAANVSSLTVSIPSGKTSVSGFYFDWAQAPPSNATVVFHNNSVSNPTFSSFGSRKGARITHIDVKLSNPYNASSNADAIVIPSGNTTNFTFSNPVPAPRFATLFVQGNQGLDKVDVQNGNGTGATVAEWAILE

SEQ ID NO: 225 - protein, 1050 aa, Aspergillus niger
LPGKNARISASLKRHAGRDVPQTALNSTNVYQTKFSGVTWDEDHWLLTTTTPDQGHYQSRGSVANGYLGINVANIGPFFELDEPVNGDVINGWPLYSRRQSFATISGFWDRQAHTNGSNFPWLSQYGDDSVISGVPHWSGLILDLGDDTYLDATVDNRTISNFKSTYDFKSGVLSWSYTWTPQGNKGSYAITYRLFAHKLYVNRAVVDMEITPLTNGNATVVNVLDGYAAVRTDFVASGQEEGAIFSAVRPWGVNNVTAYVYATLDGSDSVDLSSRRIVTDKPYVSTNSSSVAQAVDVMFTANETVRITKFVGGATTDYFLATQETAKAACLAGLADGYVKSLQSHVGEWATIMHDHSVDRFTDPATGKLPEDSHIVDSAIIAVTNTYYLLQNTAGTNAIVAAGGIPVNVDSCAPGGLTSDSYGGQIFWDADLWMQPGLVASHPESAQRFTNYRIALHYQAQANIETAFTGSKNQTSFSSSAAIYPWTSGRFGNCTATGPCWDYQYHLNGDIGLAMINQWVASGDTAWFKNYLFPIYDAAATLYSELVERNGSSWTLTNMTDPDEYANSINAGGYTMPLIAETLQNANKLRKQFGLEPNETWDEIAEDVLILRENGVTLEYTSMNGSAVVKQADIVLNTFPLTYESDNYTATNSLTDLDYYANKQSADGPAMTYAIFAIVASDVSPSGCSAFTYHQYSYAPYARGPWYQLSEQMIDDASINGGTHPAFPFLTGHGGANQVALYGYLGLRLHPDDTIYIDPNLPPQIPHITYRTFYWHGWPISAWSNYTHTTIQRDSSLAPLASADLLFSNVSIKVQVGQSTASADEATIYYLPLSGALTVPNRMIGSVNTTPGNQVQCHPVYSPDAYEPGQFPISAVDGATSTKWQPSTSDLTSLTVTLSTTAEAGAEEVSGFYFDWSQAPPENLTVIFHDSPIGNPSTVFAAAGSNSTGYRVITSMSNIVQSKPYNAISAEELNVVSIPTANTTTITLDAPVQKARYATLLIAGNQANETAGATVAEWVILGQNSTSSSSAQAKRKMSARSKATLAQLS

SEQ ID NO: 226 - protein, 1056 aa, Trichoderma reesei
TTLVDRVTKCLSRHDGSDAESHFSKNVYKTDFAGVTWDEDNWLLSTTQLKQGAFEARGSVANGYLGINVASVGPFFEVDTEEDGDVISGWPLFSRRQSFATVAGFWDAQPQMNGTNFPWLSQYGSDTAISGIPHWSGLVLDLGGGTYLDATVSNKTISHFRSTYDYKAGVLSWSYKWTPKGNKGSFDISYRLFANKLHVNQAVVDMQVTASKNVQASIVNVLDGFAAVRTDFVESGEDGSAIFAAVRPNGVANVTAYVYADITGSGGVNLSSRKIVHNKPYVHANASSIAQAVPVKFAAGRTVRVTKFVGAASSDAFKNPKQVAKKAAAAGLSNGYTKSLKAHVEEWATVMPESSVDSFADPKTGKLPADSHIVDSAIIAVTNTYYLLQNTVGKNGIKAVDGAPVNVDSISVGGLTSDSYAGQIFWDADLWMQPGLVAAHPEAAERITNYRLARYGQAKENVKTAYAGSQNETFFSASAAVFPWTSGRYGNCTATGPCWDYEYHLNGDIGISLVNQWVVNGDTKDFEKNLFPVYDSVAQLYGNLLRPNKTSWTLTNMTDPDEYANHVDAGGYTMPLIAETLQKANSFRQQFGIEQNKTWNDMASNVLVLRENGVTLEFTAMNGTAVVKQADVIMLTYPLSYGTNYSAQDALNDLDYYANKQSPDGPAMTYAFFSIVANEISPSGCSAYTYAQNAFKPYVRAPFYQISEQLIDDASVNGGTHPAYPFLTGHGGAHQVVLFGYLGLRLVPDDVIHIEPNLPPQIPYLRYRTFYWRGWPISAWSNYTHTTLSRAAGVAALEGADQRFARKPITIHAGPEQDPTAYRLPVKGSVVIPNKQIGSQQTYAGNLVQCHAASSPNDYVPGQFPIAAVDGATSTKWQPASADKVSSITVSLDKEDVGSLVSGFHFDWAQAPPVNATVIFHDEALADPATALASAHKHNSKYTTVTSLTNIELSDPYVSTKDLNAIAIPIGNTTNVTLSHPVAASRYASLLIVGNQGLDPVDVKAKNGTGATVAEWAIFGHGKEHSGKPSSHSKRRLNVRTAATLSNPRSFMRRRL

SEQ ID NO: 227 - protein, 19 aa, Saccharomyces cerevisiae
MLSLKTLLCTLLTVSSVLA

SEQ ID NO: 228 - DNA, 185 bp, Saccharomyces cerevisiae
agtgcttttaactaagaattattagtcttttctgcttattttttcatcatagtttagaacactttatattaacgaatagtttatgaatctatttaggtttaaaaattgatacagttttataagttactttttcaaagactcgtgctgtctattgcataatgcactggaaggggaaaaaaaaggtg

SEQ ID NO: 229 - protein, 555 aa, Pycnoporus sanguineus glucoamylase
QSSAVDAYVASESPIAKQGVLNNIGPNGSKAHGAKAGIVVASPSTENPDYLYTWTRDSSLVFKLLIDQFTSGDDTSLRGLIDDFTSAEAILQQVSNPSGTVSTGGLGEPKFNIDETAFTGAWGRPQRDGPALRATSIIRYANWLLDNGNTTYVSNTLWPVIQLDLDYVADNWNQSTFDLWEEVDSSSFFTTAVQHRALREGATFASRIGQSSVVSGYTTQADNLLCFLQSYWNPSGGYVTANTGGGRSGKDSNTVLTSIHTFDPAAGCDAATFQPCSDKALSNLKVYVDAFRSIYTINNGIASNAAVATGRYPEDSYMGGNPWYLTTSAVAEQLYDALYVWDQLGGLNVTSTSLAFFQQFASGLSTGTYSASSSTYATLTSAIRSFADGFLAINAKYTPADGGLAEQYSRNDGTPLSAVDLTWSYAAALTAFAAREGKTYGSWGAAGLTVPASCSGGGGATVAVTFNVQATTVFGENIYITGSVAALQNWSPDNALILSAANYPTWSITVNLPANTVVQYKYIRKFNGQVTWESDPNNQITTPSGGSFTQNDVWR

SEQ ID NO: 230 - protein, 599 aa, Trichoderma reesei
SVDDFISTETPIALNNLLCNVGPDGCRAFGTSAGAVIASPSTIDPDYYYMWTRDSALVFKNLIDRFTETYDAGLQRRIEQYITAQVTLQGLSNPSGSLADGSGLGEPKFELTLKPFTGNWGRPQRDGPALRAIALIGYSKWLINNNYQSTVSNVIWPIVRNDLNYVAQYWNQTGFDLWEEVNGSSFFTVANQHRALVEGATLAATLGQSGSAYSSVAPQVLCFLQRFWVSSGGYVDSNINTNEGRTGKDVNSVLTSIHTFDPNLGCDAGTFQPCSDKALSNLKVVVDSFRSIYGVNKGIPAGAAVAIGRYAEDVYYNGNPWYLATFAAAEQLYDAIYVWKKTGSITVTATSLAFFQELVPGVTAGTYSSSSSTFTNIINAVSTYADGFLSEAAKYVPADGSLAEQFDRNSGTPLSAVHLTWSYASFLTAAARRAGIVPPSWANSSASTIPSTCSGASVVGSYSRPTATSFPPSQTPKPGVPSGTPYTPLPCATPTSVAVTFHELVSTQFGHTVKVAGNAAALGNWSTSAAVALDAVNYRDNHPLWIGTVNLEAGDVVEYKYIIVGQDGSVTWESDPNHTYTVPAVACVTQVVKEDTWQS

SEQ ID NO: 231 - protein, 633 aa, Bacillus amyloliquefaciens
GPAAANAETANKSNKVTASSVKNGTILHAWNWSFNTLTQNMKDIRDAGYAAIQTSPINQVKEGNQGDKSMRNWYWLYQPTSYQIGNRYLGTEQEFKDMCAAAEKYGVKVIVDAVINHTTSDYGAISDEIKRIPNWTHGNTQIKNWSDRWDVTQNSLLGLYDWNTQNTEVQVYLKRFLERALNDGADGFRYDAAKHIELPDDGNYGSQFWPNITNTSAEFQYGEILQDSASRDTAYANYMNVTASNYGHSIRSALKNRNLSVSNISHYASDVSADKLVTWVESHDTYANDDEESTWMSDDDIRLGWAVIGSRSGSTPLFFSRPEGGGNGVRFPGKSQIGDRGSALFKDQAITAVNTFHNVMAGQPEELSNPNGNNQVFMNQRGSKGVVLANAGSSSVTINTSAKLPDGRYDNRAGAGSFQVANGKLTGTINARSAAVLYPDDIGNAPHVFLENYQTGAVHSFNDQLTVTLRANAKTTKAVYQINNGQQTAFKDGDRLTIGKGDPIGTTYNIKLTGTNGEGAARTQEYTFVKKDPSQTNIIGYQNPDHWGQVNAYIYKHDGGRAIELTGSWPGKAMTKNANGMYTLTLPENTDTANAKVIFNNGSAQVPGQNQPGFDYVQNGLYNNSGLNGYLPH

SEQ ID NO: 232 - DNA, 700 bp, Saccharomyces cerevisiae
cacccatgaaccacacggttagtccaaaaggggcagttcagattccagatgcgggaattagcttgctgccaccctcacctcactaacgctgcggtgtgcggatacttcatgctatttatagacgcgcgtgtcggaatcagcacgcgcaagaaccaaatgggaaaatcggaatgggtccagaactgctttgagtgctggctattggcgtctgatttccgttttgggaatcctttgccgcgcgcccctctcaaaactccgcacaagtcccagaaagcgggaaagaaataaaacgccaccaaaaaaaaaaaaataaaagccaatcctcgaagcgtgggtggtaggccctggattatcccgtacaagtatttctcaggagtaaaaaaaccgtttgttttggaatttcccatttcgcggccacctacgccgctatctttgcaacaactatctgcgataactcagcaaattttgcatattcgtgttgcagtattgcgataatgggagtcttacttccaacataacggcagaaagaaatgtgagaaaattttgcatcctttgcctccgttcaagtatataaagtcggcatgcttgataatctttctttccatcctacattgttctaattattcttattctcctttattctttcctaacataccaagaaattaatcttctgtcattcgcttaaacactatatcaataa

SEQ ID NO: 233 - DNA, 240 bp, Saccharomyces cerevisiae
tcagtactgacaataaaaagattcttgttttcaagaacttgtcatttgtatagtttttttatattgtagttgttctattttaatcaaatgttagcgtgatttatattttttttcgcctcgacatcatctgcccagatgcgaagttaagtgcgcagaaagtaatatcatgcgtcaatcgtatgtgaatgctggtcgctatactgctgtcgattcgatactaacgccgccatccagtgtcga

SEQ ID NO: 234 - protein, 18 aa, Saccharomyces cerevisiae
MQLLRCFSIFSVIASVLA

SEQ ID NO: 235 - protein, 274 aa, Thermomyces lanuginosus
EVSQDLFNQFNLFAQYSAAAYCGKNNDAPAGTNITCTGNACPEVEKADATFLYSFEDSGVGDVTGFLALDNTNKLIVLSFRGSRSIENWIANLNFWLKKINDICSGCRGHDGFTSSWRSVADTLRQKVEDAVREHPDYRVVFTGHSLGGALATVAGADLRGNGYDIDVFSYGAPRVGNRAFAEFLTVQTGGTLYRITHTNDIVPRLPPREFGYSHSSPEYWIKSGTLVPVTRNDIVKIEGIDATGGNNQPNIPDIPAHLWYFQATDACNAGGFS

SEQ ID NO: 236 - protein, 277 aa, Thermomyces lanuginosus
APAPVLRRDVSSSVLSELDLFAQYSAAAYCSSNIGSPGTKLTCSVGNCPRVEAADTETLIEFNESSSFGDVTGYIAVDRTNSLLVLAFRGSSTVSNWEADLDFPLTDASSLCSGCEIHSGFWAAWQTVQASITSTLESAIASYPGYTLVFTGHSYGAALAAIAATTLRNAGYTIQLYDYGQPRLGNLALAQYITAQTQGANYRVTHTDDIVPKLPPELFGYHHFSPEYWITSGDNVTVTTSDVQVVTGIDSTAGNDGTLLDSTSAHDWYIVYIDGCD

SEQ ID NO: 237 - protein, 594 aa, Penicillium emersonii
SAPYDKRDLAQEIWDDIKNAVDCAGCQVVLTALKGVADLGTTALVDVLTEVCNISGKEDSDVCSGIISREGPVLDYVLQHLDIGSHTSQVICASAFGLCQYPEVRPYNLTFPKPKPNTTRPEPSGESPIQVVHFSDTHVDLSYETGSNYNCTKPICCRPYTAEDAPGNTTTPCGPYGNTKCDAPLSLEESMFAAIKALNPQPAFSIYTGDVVAHDIWLVDQNEVIEDLNATYDRMAGLGLVYAAIGNHDTAPVNDLPTSNIPSEYSANWTYEALSYDFTMLTQSASAQTAANYGSYSAIYPGSYGTDLRVISYNSIFYYVDNFWAYQDPMEFDPDGQLAWLINELQEAETAGQRVWIIAHVPTGTSDHFHDYSHYFDQIVQRYEATIAALFYGHTHIDQFQISYSNYSNRAFDTATAIGYIMPSLTPTSGPPTFRVYDVDPKTFAVLDFTNYIANISDPAFQSGPSWQKYYSAKETYGSLLSPPVTDPTAELTPAFWHNVTVAFEQDNATFQEYWARQTRGYDVSSCTGSCITQAICGLRAGDAQYNCVTPTPGFNFAKRDTSNPKQALSHVEKCEGSGLLGLLRRMVADSKSS

SEQ ID NO: 238 - protein, 259 aa, Bacillus thuringiensis
HENDGGSKIKIIHRWSAEDKHKEGVNSHLWIVNRAIDIMSRNTTLVKQDRVAQLNEWRTELENGIYAADYENPYYDNSTFASHFYDPDNGKTYIPFAKQAKETGAKYFKLAGESYKNKDMKQAFFYLGLSLHYLGDVNQPMHAANFTNLSYPQGFHSKYENFVDTIKDNYKVTDGNGYWNWKGTNPEDWIHGAAVVAKQDYSGIVNDNTKDWFVKAAVSQEYADKWRAEVTPMTGKRLMDAQRVTAGYIQLWFDTYGDR

SEQ ID NO: 239 - protein, 297 aa, Pseudomonas sp.
QESPAFIDPASWNTPFNGIAQVACHNCYEKQYANTFSSVLDSVRTLELDFWDQRDAVSGGSPHHWFVRHNPGTLFQSGNDNNCTGDGTGKNDLEACLNDVKNWSDKHPGHFPITLILDKKQGWSKESSGRTPKDFDELVARVFQGKLFTPQDLATHIGSGAGALQGNLKGKSWPTANDLQGKVLLVLNHSENQKLSQYAEARTSKAKVFISPVTNGQNDISGKVSGMSSQSSGYVAMNNMGKGDKSWAKQAFAYSHIGRVWGDDEVSFAQHINQKINLSAYYRFAAQSAGGYRIRPF

SEQ ID NO: 240 - protein, 625 aa, Kionochaeta sp.
AVNPADVLSVVEKRVDPASGLEVRSIWDTIWNDIKSAADCTACEAVLTLLKGVAAFGDNFFVEVLTEICDLSGAEDDDVCSGVLSLEGPIIANDIRKMSIGSKTSELFCITFLGLCSYPAVDAFTVPFPTAKSAATRPVSSGKDPIYVVHYSDIHIDPFYVAGSASNCTKPICCRDYTSASSPGNNNSPAGPYGDHNCDVPISLEDSMYAAIKKLVPDAAFGIFTGDIVDHAVWNTSESQNIIDMNDAYTRMKNSGMLPTIFATAGNHEASPVNSFPPPAIGNESQWVYDTLASDWSQWIGTSGASSVESIGAYSVQYGSTKLRVISLNTNMYYIENFYLYEPTMEQDPAGQFAWLVSELSAAEAAGERVWIIGHMPLGLSDAFHDPSNYFDQIVNRYEATIAAMFFGHTHEDHFQISYSDYNARTAANARAVSYIMPSLTPTSGHPTFRVYTVDPETFGVLDATTYYADMSQPTYQTAGPAWSVYYSAKAAYGGLVDPPVAADDAAAELTPAFWHNVTAALAADPASFDAYYARKTRGWDVAACAGACAAAEVCALRAARAQDNCVVPTPGVHFSKRADEGTLAHHRDECGVSVARNSLSSLVVQREALEHLEGRLSEKRRMAV

SEQ ID NO: 241 - protein, 613 aa, Mariannaea pinicola
QEVTHDLAGIKRSLESRDWVEDLWDKFESDATCAGCESLVLVLKGLAAISDQAFIDVLQEICKISGAEDDDVCDGSIQLEGPVIASGLRSMAIGSRTSKEFCTTFLGLCAYPAVQQWSVPFSSSKSSKTRPSSSGKDPIKVVHYSDIHIDPLYVGGSNSNCTKPICCRSYTKADQPGNNKYPAGPNGDHNCDSPVSLEKSMYNAIKEIVPDAAFTIFTGDIVDHAVWNTSQSYNTEQITNAYGLMSDNLGTIYGTAGNHEAHPANAFQPNSVGNVSQWVYDLLSGLWSQWISTEAKADSEKLGAYSTKYPGGNLRIISLNTNMYYRENYWLYRKTMIQDPSNQISWLVNELEAAETAGERVYIIGHMPLGDSNSFHDQSNYLDQVINRYSATISAMFFGHTHDDQFQISYSNWSNRNFSNALVTSYIGPSLTPTAGMPAFRVYDVDPVTFGILDSTTYIADMTDSAFQTTGPVWKKYYSAKEVYGSLLSPAVTDSSAELTAAFWHNVTTLFEADNTAFEAFLSRKSRGWKSESCTGTCKANEICQLRAARSENNCYTPSLGISFNKRSLNPVEERDECGISVTRATVSAMGVRKDVLRLLKKRFIEKAGEVRG

SEQ ID NO: 242 - protein, 259 aa, Fictibacillus macauensis
HENEGGNKVRVIQYWSAEDPHHEDTNTHLWIVRHAMEIMANNKDVVKPGEVEQLKQWQSDLEQGIYDADHANPYYDNATFASHFYDPDTGKSYIPLAAHAKTTSVKYFKRAGEAYQKGDHKQAFYNLGLALHYIGDLNQPMHAANFTNLSYPQGFHSKYENYVDSFKEDYAVKDGEGYWHWKGTNPEDWLHGTAVAAKKDYPDIVNDTTKAWFVKAAVSNSYAAKWRAAVVPATGKRLTEAQRILAGYMQLWFDTYVNK

SEQ ID NO: 243 - DNA, 250 bp, Saccharomyces cerevisiae
acagaagacgggagacactagcacacaactttaccaggcaaggtatttgacgctagcatgtgtccaattcagtgtcatttatgattttttgtagtaggatataaatatatacagcgctccaaatagtgcggttgccccaaaaacaccacggaacctcatctgttctcgtactttgttgtgacaaagtagctcactgccttattatcacattttcattatgcaacgcttcggaaaatacgatgttgaaaat

SEQ ID NO: 244 - protein, 19 aa, Acremonium alcalophium
MKLLPSLIGLASLASLAVA

SEQ ID NO: 245 - protein, 26 aa, Aspergillus fumigatus
MLASTFSYRMYKTALILAALLGSGQA

SEQ ID NO: 246 - protein, 19 aa, Aspergillus fumigatus
MKHLASSIALTLLLPAVQA

SEQ ID NO: 247 - protein, 22 aa, Ambrosiozyma monospora
MKTKLAFITSLLCIASISTVTG

SEQ ID NO: 248 - protein, 19 aa, Aspergillus oryzae
MMVAWWSLFLYGLQVAAPA

SEQ ID NO: 249 - protein, 17 aa, Candida blankii
MKTLGLFATLACTLVYA

SEQ ID NO: 250 - protein, 15 aa, Candida homilentoma
MLLSRVLVLATAALA

SEQ ID NO: 251 - protein, 18 aa, Candida silvanorum
MKVDVLLISWFWVASCAA

SEQ ID NO: 252 - protein, 21 aa, Dekkera bruxellensis
MCISPFYLFSIVFLLIQDVST

SEQ ID NO: 253 - protein, 24 aa, Filobasidium capsuligenum
MLHNAVSILAALALSGLFSTSTSA

SEQ ID NO: 254 - protein, 17 aa, Gloeophyllum sepiarium
MYRFLVCALGLAASVLA

SEQ ID NO: 255 - protein, 17 aa, Gloeophyllum trabeum
MYRFLVCALGLLGTVLA

SEQ ID NO: 256 - protein, 18 aa, Homo sapiens
MVRMVPVLLSLLLLLGPA

SEQ ID NO: 257 - protein, 16 aa, Hyphopichia burtonii
MKFFILLIFWLSAIKA

SEQ ID NO: 258 - protein, 19 aa, Kluyveromyces marxianus
MLFSNTLLIAAASALLAEA

SEQ ID NO: 259 - protein, 16 aa, Nakazawaea ernobii
MRSLITLALFLSSTIA

SEQ ID NO: 260 - protein, 19 aa, Nakazawaea ernobii
MILIKITILVTCLLLGLHS

SEQ ID NO: 261 - protein, 22 aa, Ogataea methanolica
MLTAKALLLALVCLSGTSDSRA

SEQ ID NO: 262 - protein, 18 aa, Pycnoporus sanguineus
MRFTLLASLIGLAVGAFA

SEQ ID NO: 263 - protein, 20 aa, Pichia pastoris
MLSTILNIFILLLFIQASLQ

SEQ ID NO: 264 - protein, 16 aa, Pichia pastoris
MKILSALLLLFTLAFA

SEQ ID NO: 265 - protein, 20 aa, Pichia pastoris
MKVSTTKFLAVFLLVRLVCA

SEQ ID NO: 266 - protein, 18 aa, Pichia pastoris
MWSLFISGLLIFYPLVLG

SEQ ID NO: 267 - protein, 17 aa, Pichia pastoris
MRPVLSLLLLLASSVLA

SEQ ID NO: 268 - protein, 17 aa, Pichia stipitis
MKLQLLLLLQFVSFCYS

SEQ ID NO: 269 - protein, 21 aa, Rhizomucor pusillus
MRLSTSSLFLSVSLLGKLALG

SEQ ID NO: 270 - protein, 18 aa, Saccharomycopsis fibuligera
MIRLTVFLTAVFAAVASC

SEQ ID NO: 271 - protein, 19 aa, Saccharomyces cerevisiae
MLLQAFLFLLAGFAAKISA

SEQ ID NO: 272 - protein, 18 aa, Saccharomyces cerevisiae
MQLLRCFSIFSVIASVLA

SEQ ID NO: 273 - protein, 22 aa, Saccharomyces cerevisiae
MKVLDLLTVLSASSLLSTFAAA

SEQ ID NO: 274 - protein, 19 aa, Saccharomyces cerevisiae
MLSLKTLLCTLLTVSSVLA

SEQ ID NO: 275 - protein, 22 aa, Saccharomyces cerevisiae
MKLQSLLVSAAVLTSLTENVNA

SEQ ID NO: 276 - protein, 22 aa, Saccharomyces cerevisiae
MKLSATTLTAASLIGYSTIVSA

SEQ ID NO: 277 - protein, 19 aa, Saccharomyces cerevisiae
MRFPSIFTTVLFAASSALA

SEQ ID NO: 278 - protein, 19 aa, Saccharomyces cerevisiae
MKLSKLSILTSALATSALA

SEQ ID NO: 279 - protein, 22 aa, Saccharomyces cerevisiae
MRQVWFSWIVGLFLCFFNVSSA

SEQ ID NO: 280 - protein, 19 aa, Saccharomyces cerevisiae
MQLRNILQASSLISGLSLA

SEQ ID NO: 281 - protein, 20 aa, Saccharomyces cerevisiae
MISPISFLSSLLCLTYLTSA

SEQ ID NO: 282 - protein, 18 aa, Saccharomyces cerevisiae
MLEFPISVLLGCLVAVKA

SEQ ID NO: 283 - protein, 21 aa, Saccharomyces cerevisiae
MKLKTVRSAVLSSLFASQVLG

SEQ ID NO: 284 - protein, 20 aa, Saccharomyces cerevisiae
MVKLTSIAAGVAAIAATASA

SEQ ID NO: 285 - protein, 20 aa, Saccharomyces cerevisiae
MVKLTSIVAGVAAIAAGVAA

SEQ ID NO: 286 - protein, 20 aa, Saccharomyces cerevisiae
MVSFRGLTTLTLLFTKLVNC

SEQ ID NO: 287 - protein, 17 aa, Saccharomyces cerevisiae
MLKSAVYSILAASLVNA

SEQ ID NO: 288 - protein, 19 aa, Saccharomyces cerevisiae
MQFKNALTATAILSASALA

SEQ ID NO: 289 - protein, 17 aa, Saccharomyces cerevisiae
MFKSVVYSVLAAALVNA

SEQ ID NO: 290 - protein, 17 aa, Saccharomyces cerevisiae
MFKSVVYSILAASLANA

SEQ ID NO: 291 - protein, 23 aa, Saccharomyces cerevisiae
MLQKLSMTALVGLFSSVVSLVNA

SEQ ID NO: 292 - protein, 22 aa, Saccharomyces cerevisiae
MKFSAGAVLSWSSLLLASSVFA

SEQ ID NO: 293 - protein, 20 aa, Saccharomyces cerevisiae
MVKPVIFAICLGVLLSKALS

SEQ ID NO: 294 - protein, 19 aa, Saccharomyces cerevisiae
MQLHSLIASTALLITSALA

SEQ ID NO: 295 - protein, 22 aa, Saccharomyces cerevisiae
MKLSVLTFVVDALLVCSSIVDA

SEQ ID NO: 296 - protein, 22 aa, Saccharomyces cerevisiae
MPLKSFFFSAFLVLCLSKFTQG

SEQ ID NO: 297 - protein, 23 aa, Saccharomyces cerevisiae
MAIVNSWLICLVSIFSFVVRVEA

SEQ ID NO: 298 - protein, 19 aa, Saccharomyces cerevisiae
MSFLSIFTFFSVLISVATT

SEQ ID NO: 299 - protein, 24 aa, Saccharomyces cerevisiae
MSAINHLCLKLILASFAIINTITA

SEQ ID NO: 300 - protein, 22 aa, Saccharomyces cerevisiae
MTQLQISLLLTATISLLHLVVA

SEQ ID NO: 301 - protein, 20 aa, Saccharomyces cerevisiae
MFVHRLWTLAFPFLVEISKA

SEQ ID NO: 302 - protein, 20 aa, Saccharomyces cerevisiae
MKLQLAAVATLAVLTSPAFG

SEQ ID NO: 303 - protein, 21 aa, Saccharomyces cerevisiae
MTNALLSIAVLLFSMLSLAQA

SEQ ID NO: 304 - protein, 21 aa, Saccharomyces cerevisiae
MQLSKSILLAALAATPSLVNA

SEQ ID NO: 305 - protein, 20 aa, Saccharomyces cerevisiae
MKAFTSLLCGLGLSTTLAKA

SEQ ID NO: 306 - protein, 22 aa, Saccharomyces cerevisiae
MLFKSLSKLATAAAFFAGVATA

SEQ ID NO: 307 - protein, 19 aa, Saccharomyces cerevisiae
MKFQVVLSALLACSSAVVA

SEQ ID NO: 308 - protein, 20 aa, Saccharomyces cerevisiae
MNKLLLHLVRVISILGLANA

SEQ ID NO: 309 - protein, 16 aa, Saccharomyces cerevisiae
MQLYLTLLFLLSFVEC

SEQ ID NO: 310 - protein, 26 aa, Saccharomyces cerevisiae
MIRPLCSKIIISYIFAISQFLLAANA

SEQ ID NO: 311 - protein, 19 aa, Saccharomyces cerevisiae
MLLRSLTSAFVLSAGLAQA

SEQ ID NO: 312 - protein, 20 aa, Saccharomyces cerevisiae
MKFSSGKSIIFATIASLALS

SEQ ID NO: 313 - protein, 19 aa, Saccharomyces cerevisiae
MSFLNIFTFFSVLVSVATA

SEQ ID NO: 314 - protein, 23 aa, Saccharomyces cerevisiae
MRFSTTLATAATALFFTASQVSA

SEQ ID NO: 315 - protein, 20 aa, Saccharomyces cerevisiae
MVKLTSIAAGVAAIAAGIAA

SEQ ID NO: 316 - protein, 20 aa, Saccharomyces cerevisiae
MVKLTSIAAGVAAIAAGASA

SEQ ID NO: 317 - protein, 19 aa, Saccharomyces cerevisiae
MSRISILAVAAALVASATA

SEQ ID NO: 318 - protein, 21 aa, Saccharomyces cerevisiae
MQRPFLLAYLVLSLLFNSALG

SEQ ID NO: 319 - protein, 19 aa, Saccharomyces cerevisiae
MVNISIVAGIVALATSAAA

SEQ ID NO: 320 - protein, 18 aa, Saccharomyces cerevisiae
MAYTKIALFAAIAALASA

SEQ ID NO: 321 - protein, 22 aa, Saccharomyces cerevisiae
MAYSKITLLAALAAIAYAQTQA

SEQ ID NO: 322 - protein, 18 aa, Saccharomyces cerevisiae
MKLSTVLLSAGLASTTLA

SEQ ID NO: 323 - protein, 19 aa, Saccharomyces cerevisiae
MKFISTFLTFILAAVSVTA

SEQ ID NO: 324 - protein, 19 aa, Saccharomyces cerevisiae
MQFPFACLLSTLVISGSLA

SEQ ID NO: 325 - protein, 19 aa, Saccharomyces cerevisiae
MRLSNLIASASLLSAATLA

SEQ ID NO: 326 - protein, 21 aa, Saccharomyces cerevisiae
MRLQRNSIICALVFLVSFVLG

SEQ ID NO: 327 - protein, 18 aa, Saccharomyces cerevisiae
MKFSKVSLLAASASVALS

SEQ ID NO: 328 - protein, 18 aa, Saccharomyces cerevisiae
MRFSNFLTVSALLTGALG

SEQ ID NO: 329 - protein, 16 aa, Saccharomycopsis capsularis
MLLLPLLLFAASLAAS

SEQ ID NO: 330 - protein, 18 aa, Saccharomycopsis capsularis
MKLSVSSLFLLLAGICQS

SEQ ID NO: 331 - protein, 19 aa, Saccharomycopsis fibuligera
MKFGVLFSVFAAIVSALPA

SEQ ID NO: 332 - protein, 23 aa, Saitozyma flava
MRSVGELRHQLLSLSALSALASS

SEQ ID NO: 333 - protein, 18 aa, Schwanniomyces occidentalis
MKVNYLFPLLSILILTNG

SEQ ID NO: 334 - protein, 17 aa, Talaromyces leycetannus
MKLSTLNFLSLAGLVSA

SEQ ID NO: 335 - protein, 17 aa, Trichophaea sacatta
MHALTLLTATLFGLAAA

SEQ ID NO: 336 - protein, 20 aa, Talaromyces emersonii
MASLVAGALCILGLTPAAFA

SEQ ID NO: 337 - protein, 17 aa, Trichoderma reesei
MYRKLAVISAFLATARA

SEQ ID NO: 338 - protein, 18 aa, Trichoderma reesei
MIVGILTTLATLATLAAS

SEQ ID NO: 339 - protein, 21 aa, Humicola insolens
MRSSPLLRSAVVAALPVLALA

SEQ ID NO: 340 - DNA, 57 bp, Acremonium alcalophium
atgaagttgctgccctcattgataggtttggcctcactagctagccttgccgtcgca

SEQ ID NO: 341 - DNA, 78 bp, Aspergillus fumigatus
atgcttgcctccacattcagttataggatgtataagactgcattgatcctggcagcattgctgggctctggtcaggcc

SEQ ID NO: 342 - DNA, 57 bp, Aspergillus fumigatus
atgaagcatctggcctcatctatagctttgaccttactattaccagccgtgcaagca

SEQ ID NO: 343 - DNA, 66 bp, Ambrosiozyma monospora
atgaagactaaacttgctttcattacgagtcttctatgtatcgcctcaatctctacagtgactggt

SEQ ID NO: 344 - DNA, 57 bp, Aspergillus oryzae
atgatggttgcctggtggtccttgtttttgtacggtctacaagttgctgcccctgca

SEQ ID NO: 345 - DNA, 51 bp, Candida blankii
atgaagacattaggcctttttgctaccttagcttgtactttggtgtatgca

SEQ ID NO: 346 - DNA, 45 bp, Candida homilentoma
atgttactatcaagagtgttagtacttgccactgctgccttagct

SEQ ID NO: 347 - DNA, 54 bp, Candida silvanorum
atgaaagtggacgttctgttgatttcttggttttgggtggcttcctgtgctgcc

SEQ ID NO: 348 - DNA, 63 bp, Dekkera bruxellensis
atgtgtatttcccccttttacttattctcaatcgtgttcttgttaatccaggatgtgtctaca

SEQ ID NO: 349 - DNA, 72 bp, Filobasidium capsuligenum
atgttacataatgccgtgtccatcttagctgccttagccttgtcaggcttgttttccacgagcacaagtgct

SEQ ID NO: 350 - DNA, 51 bp, Gloeophyllum sepiarium
atgtacagatttcttgtctgtgcccttggtttggcagcttctgtgttagca

SEQ ID NO: 351 - DNA, 51 bp, Gloeophyllum trabeum
atgtacagatttcttgtctgtgcccttggtttgttaggtactgtgttagca

SEQ ID NO: 352 - DNA, 54 bp, Homo sapiens
atggtaaggatggttccggtcttattgagtttgttgcttttactaggtccagcc

SEQ ID NO: 353 - DNA, 48 bp, Hyphopichia burtonii
atgaagtttttcatcttacttatcttttggctttcagccatcaaagct

SEQ ID NO: 354 - DNA, 57 bp, Kluyveromyces marxianus
atgttgtttagcaacacattgttgattgctgccgctagtgctctgcttgccgaagca

SEQ ID NO: 355 - DNA, 48 bp, Nakazawaea ernobii
atgagatcattgattacacttgccttgttcctttcatctacaattgct

SEQ ID NO: 356 - DNA, 57 bp, Nakazawaea ernobii
atgatcttgatcaagattaccatattggttacctgtctattactgggccttcatagt

SEQ ID NO: 357 - DNA, 66 bp, Ogataea methanolica
atgttaactgctaaggctctattactggcccttgtctgtcttagtggtacctcagatagtagagca

SEQ ID NO: 358 - DNA, 54 bp, Pycnoporus sanguineus
atgagattcaccttgctggcctcattgataggtttggccgtaggagctttcgcc

SEQ ID NO: 359 - DNA, 60 bp, Pichia pastoris
atgctgagtaccatcttgaacattttcattctattactgttcatccaagcaagtcttcaa

SEQ ID NO: 360 - DNA, 48 bp, Pichia pastoris
atgaagattctttcagcacttcttttgctgttcacattggcatttgct

SEQ ID NO: 361 - DNA, 60 bp, Pichia pastoris
atgaaggtctcaactaccaagtttcttgctgtctttctgcttgtgaggttagtctgcgct

SEQ ID NO: 362 - DNA, 54 bp, Pichia pastoris
atgtggagtttgttcataagcggcttattgatattctaccctcttgttttagga

SEQ ID NO: 363 - DNA, 51 bp, Pichia pastoris
atgcgtcctgtacttagtttgctgttgttattggcatcatctgtgttagca

SEQ ID NO: 364 - DNA, 51 bp, Pichia stipitis
atgaagttacaacttcttttgctgcttcaatttgtatcattttgctattcc

SEQ ID NO: 365 - DNA, 63 bp, Rhizomucor pusillus
atgagattgtccacttcttccttattcttaagcgtgagtctattaggcaagttagccttgggt

SEQ ID NO: 366 - DNA, 54 bp, Saccharomycopsis fibuligera
atgataaggcttactgtgttcttaactgcagtttttgccgctgtcgctagctgc

SEQ ID NO: 367 - DNA, 57 bp, Saccharomyces cerevisiae
atgcttttgcaggcctttttgtttttgttagccggtttcgctgccaagatctccgca

SEQ ID NO: 368 - DNA, 54 bp, Saccharomyces cerevisiae
atgcaacttcttagatgcttctccatcttttcagttatcgctagtgttctggcc

SEQ ID NO: 369 - DNA, 66 bp, Saccharomyces cerevisiae
atgaaggttttggacttattgactgtgcttagtgcatccagtttgttaagtacttttgccgctgca

SEQ ID NO: 370 - DNA, 57 bp, Saccharomyces cerevisiae
atgctttctctgaagacattgttatgtactttgttaacagttagcagtgtgctagca

SEQ ID NO: 371 - DNA, 66 bp, Saccharomyces cerevisiae
atgaagttgcaaagtttactagtttctgctgccgtcttaaccagtttaaccgaaaatgtgaatgca

SEQ ID NO: 372 - DNA, 66 bp, Saccharomyces cerevisiae
atgaagttgtctgccacaacattaactgctgcctccttaatcggctatagtactattgtgtctgca

SEQ ID NO: 373 - DNA, 57 bp, Saccharomyces cerevisiae
atgaggtttccgtccatctttacaactgttctttttgcagctagctctgccctagca

SEQ ID NO: 374 - DNA, 57 bp, Saccharomyces cerevisiae
atgaagttgagcaagttatccatattgactagtgctctagctacgagtgccctagca

SEQ ID NO: 375 - DNA, 66 bp, Saccharomyces cerevisiae
atgaggcaagtttggtttagttggatcgtgggcctatttctttgctttttcaatgtatcctctgca

SEQ ID NO: 376 - DNA, 57 bp, Saccharomyces cerevisiae
atgcagttgcgtaacattttgcaagcttcttccttgatatcagggctttccctagca

SEQ ID NO: 377 - DNA, 60 bp, Saccharomyces cerevisiae
atgatctccccaatttcctttttgtcctcattgttatgccttacctacttaacctccgct

SEQ ID NO: 378 - DNA, 54 bp, Saccharomyces cerevisiae
atgttagagttcccaatcagtgtattgttaggttgtcttgtagcagttaaggcc

SEQ ID NO: 379 - DNA, 63 bp, Saccharomyces cerevisiae
atgaaattgaagactgttcgttcagcagttctgagtagtctatttgccagtcaagtgttgggt

SEQ ID NO: 380 - DNA, 60 bp, Saccharomyces cerevisiae
atggtgaagttaacttccattgctgccggtgtcgctgccattgccgcaacagccagtgct

SEQ ID NO: 381 - DNA, 60 bp, Saccharomyces cerevisiae
atggtgaagttaacttccattgttgccggtgtcgctgccattgccgcaggagttgccgct

SEQ ID NO: 382 - DNA, 60 bp, Saccharomyces cerevisiae
atggtgagttttagaggattgactaccttaacattactgttcaccaagttagtcaactgt

SEQ ID NO: 383 - DNA, 51 bp, Saccharomyces cerevisiae
atgttgaaatcagccgtctatagcatcttagctgcatcattggtgaatgca

SEQ ID NO: 384 - DNA, 57 bp, Saccharomyces cerevisiae
atgcagtttaagaacgctttgacagctactgccattctatcagcctctgccctagca

SEQ ID NO: 385 - DNA, 51 bp, Saccharomyces cerevisiae
atgttcaaatcagtggtctatagcgtcttagctgcagctttggtgaatgca

SEQ ID NO: 386 - DNA, 51 bp, Saccharomyces cerevisiae
atgttcaaatcagtggtctatagcatcttagctgcatcattggccaatgca

SEQ ID NO: 387 - DNA, 69 bp, Saccharomyces cerevisiae
atgttgcagaaactatcaatgactgccctagtaggcttgttttcctctgtagtgtctttagtcaacgcc

SEQ ID NO: 388 - DNA, 66 bp, Saccharomyces cerevisiae
atgaagttttctgccggtgcagttctgtcctggagtagtcttcttttagcctcttcagtgtttgca

SEQ ID NO: 389 - DNA, 60 bp, Saccharomyces cerevisiae
atggtgaagccagtcatctttgctatctgtctaggtgtgcttcttagtaaagccctttca

SEQ ID NO: 390 - DNA, 57 bp, Saccharomyces cerevisiae
atgcagttgcactccttgattgcatcaactgccttattgattacgagtgccctagca

SEQ ID NO: 391 - DNA, 66 bp, Saccharomyces cerevisiae
atgaagttgtctgtgttaacatttgtggtggacgcattacttgtctgttcctctattgtggatgca

SEQ ID NO: 392 - DNA, 66 bp, Saccharomyces cerevisiae
atgcctttgaaatcctttttctttagcgccttcctagtactttgcttatccaagtttacccaaggt

SEQ ID NO: 393 - DNA, 69 bp, Saccharomyces cerevisiae
atggctatcgtaaactcatggcttatctgtttagtctccattttctcttttgtggttagagtcgaggcc

SEQ ID NO: 394 - DNA, 57 bp, Saccharomyces cerevisiae
atgtcctttctgtccatctttaccttcttttccgtattgattagcgtggccacaaca

SEQ ID NO: 395 - DNA, 72 bp, Saccharomyces cerevisiae
atgtcagccatcaatcacctttgcttaaagcttattcttgcttcattcgccatcataaacacgattaccgct

SEQ ID NO: 396 - DNA, 66 bp, Saccharomyces cerevisiae
atgacacaattgcagattagtttactgcttaccgcaacaatctccttacttcatttagtggttgca

SEQ ID NO: 397 - DNA, 60 bp, Saccharomyces cerevisiae
atgttcgtccatagattatggactcttgctttcccattccttgtggagatatccaaggct

SEQ ID NO: 398 - DNA, 60 bp, Saccharomyces cerevisiae
atgaagcttcaattggcagctgttgccacactagctgtgcttacctcccctgccttcggt

SEQ ID NO: 399 - DNA, 63 bp, Saccharomyces cerevisiae
atgacaaatgcattgttgtccattgcagttctgcttttcagtatgctttccttagcccaagct

SEQ ID NO: 400 - DNA, 63 bp, Saccharomyces cerevisiae
atgcaattgtccaaatctatcttactagctgcccttgccgcaacacccagtttagtgaatgct

SEQ ID NO: 401 - DNA, 60 bp, Saccharomyces cerevisiae
atgaaggcctttacttccttgttgtgcggtctaggtctgagtaccacattagccaaggct

SEQ ID NO: 402 - DNA, 66 bp, Saccharomyces cerevisiae
atgttgttcaaaagtttatccaaactggctaccgcagcagccttctttgccggtgtagccactgca

SEQ ID NO: 403 - DNA, 57 bp, Saccharomyces cerevisiae
atgaagtttcaggtcgtattgtccgctttgcttgcttgttcatctgccgtggtcgca

SEQ ID NO: 404 - DNA, 60 bp, Saccharomyces cerevisiae
atgaacaagttattgttacatttggtgagagtcattagcatccttggattagccaacgct

SEQ ID NO: 405 - DNA, 48 bp, Saccharomyces cerevisiae
atgcagctatacttgaccctgttgtttttgttaagtttcgtcgagtgt

SEQ ID NO: 406 - DNA, 78 bp, Saccharomyces cerevisiae
atgatcaggcctttatgctccaaaatcatcatttcctacattttcgccatctcacagtttctgcttgctgcaaacgcc

SEQ ID NO: 407 - DNA, 57 bp, Saccharomyces cerevisiae
atgcttttgcgttccttaactagtgcttttgtgttaagtgctgggcttgcccaagca

SEQ ID NO: 408 - DNA, 60 bp, Saccharomyces cerevisiae
atgaagttctcatctggaaaatctatcattttcgctacgatcgcctccttagccctttca

SEQ ID NO: 409 - DNA, 57 bp, Saccharomyces cerevisiae
atgagttttctgaacatctttaccttctttagtgtactagttagcgtggccacagca

SEQ ID NO: 410 - DNA, 69 bp, Saccharomyces cerevisiae
atgagattctcaacaactctggctaccgcagcaaccgccttattctttacagcctctcaagtcagcgcc

SEQ ID NO: 411 - DNA, 60 bp, Saccharomyces cerevisiae
atggtgaagttaacttccattgctgccggtgtcgctgccattgccgcaggaattgccgct

SEQ ID NO: 412 - DNA, 60 bp, Saccharomyces cerevisiae
atggtgaagttaacttccattgctgccggtgtcgctgccattgccgcaggagccagtgct

SEQ ID NO: 413 - DNA, 57 bp, Saccharomyces cerevisiae
atgagtagaatctccattttggcagttgctgccgctctagttgccagtgccacagca

SEQ ID NO: 414 - DNA, 63 bp, Saccharomyces cerevisiae
atgcaaagaccctttttgcttgcttacttagtgctttccttgttattcaactcagccttgggt

SEQ ID NO: 415 - DNA, 57 bp, Saccharomyces cerevisiae
atggtcaatatctccattgttgcaggtattgtggctctagctacgtctgccgcagca

SEQ ID NO: 416 - DNA, 54 bp, Saccharomyces cerevisiae
atggcatacaccaaaatcgccttgtttgcagctattgccgctctagctagcgcc

SEQ ID NO: 417 - DNA, 66 bp, Saccharomyces cerevisiae
atggcatattctaagattaccttgttagctgccctagcagccatcgcttacgctcaaacccaagca

SEQ ID NO: 418 - DNA, 54 bp, Saccharomyces cerevisiae
atgaaactttccactgtgttgttatctgcaggtttggcctcaacaactctggcc

SEQ ID NO: 419 - DNA, 57 bp, Saccharomyces cerevisiae
atgaagtttatcagtaccttcttaacctttatcttagcagctgtgagtgtgacagca

SEQ ID NO: 420 - DNA, 57 bp, Saccharomyces cerevisiae
atgcagtttccgttcgcttgcttattgtctaccttagtcattagcggctccctagca

SEQ ID NO: 421 - DNA, 57 bp, Saccharomyces cerevisiae
atgaggttgagcaacttgattgcatcagctagtttactatcagctgctaccctagca

SEQ ID NO: 422 - DNA, 63 bp, Saccharomyces cerevisiae
atgagattgcaaagaaattccatcatatgtgcccttgtgttcttagtcagttttgtgttgggt

SEQ ID NO: 423 - DNA, 54 bp, Saccharomyces cerevisiae
atgaaattcagtaaagtgtccttattggcagcttctgcctcagtcgctctgagt

SEQ ID NO: 424 - DNA, 54 bp, Saccharomyces cerevisiae
atgagattctccaatttccttacagttagtgctttgcttacaggagctctgggc

SEQ ID NO: 425 - DNA, 48 bp, Saccharomycopsis capsularis
atgttgttacttcctttacttctttttgctgcctcattggcagcttct

SEQ ID NO: 426 - DNA, 54 bp, Saccharomycopsis capsularis
atgaaactttccgttagctccttgttcttattgttagccggtatatgtcagtcc

SEQ ID NO: 427 - DNA, 57 bp, Saccharomycopsis fibuligera
atgaagtttggggtcttgtttagtgtttttgccgctatagtttctgcccttcctgca

SEQ ID NO: 428 - DNA, 69 bp, Saitozyma flava
atgagatccgtaggagaactgcgtcaccaattactttccttatccgctttatccgctttagcaagcagc

SEQ ID NO: 429 - DNA, 54 bp, Schwanniomyces occidentalis
atgaaggtgaactacttgttcccattgttgtcaatcttgatcttgacaaacggc

SEQ ID NO: 430 - DNA, 51 bp, Talaromyces leycetannus
atgaagttatcaaccttgaatttcctttcattggcaggtttggtgtcagca

SEQ ID NO: 431 - DNA, 51 bp, Trichophaea sacatta
atgcacgcattaacccttttgacggccacattgtttggtttagccgctgca

SEQ ID NO: 432 - DNA, 60 bp, Talaromyces emersonii
atggcctccttagttgcaggtgctctttgcatcttagggcttacccctgcagccttcgct

SEQ ID NO: 433 - DNA, 51 bp, Trichoderma reesei
atgtacagaaaacttgccgttatcagtgccttcttagctactgccagagca

SEQ ID NO: 434 - DNA, 54 bp, Trichoderma reesei
atgatagtgggcattttgaccacattggcaactttggccacactagctgccagt

SEQ ID NO: 435 - DNA, 63 bp, Humicola insolens
atgagatcttccccattgcttagatccgctgtggttgccgcattacccgtcttagccttggct

SEQ ID NO: 436 - DNA, 26 bp, Artificial sequence
  Primer
agcacaatccaaggaaaaatctggcc

SEQ ID NO: 437 - DNA, 26 bp, Artificial sequence
  Primer
tttgtttgtttatgtgtgtttattcg

SEQ ID NO: 438 - DNA, 21 bp, Artificial sequence
  Primer
gccactagcgatgattggaag

SEQ ID NO: 439 - DNA, 18 bp, Artificial sequence
  Primer
ggggtcgcaacttttccc

SEQ ID NO: 440 - DNA, 19 bp, Artificial sequence
  Primer
cagtctgtggattcctacg

SEQ ID NO: 441 - protein, 844 aa, Aspergillus fumigatus
QELAFSPPFYPSPWADGQGEWADAHRRAVEIVSQMTLAEKVNLTTGTGWEMDRCVGQTGSVPRLGINWGLCGQDSPLGIRDSDLNSAFPAGTNVAATWDKTLAYLRGKAMGEEFNDKGVDILLGPAAGPLGKYPDGGRIWEGFSPDPVLTGVLFAETIKGIQDAGVIATAKHYILNEQEHFRQVGEAQGYGYNITETISSNVDDKTMHELYLWPFADAVRAGVGAVMCSYNQINNSYGCQNSQTLNKLLKAELGFQGFVMSDWGAHHSGVGAALAGLDMSMPGDISFDDGLSFWGTNLTVSVLNGTVPAWRVDDMAVRIMTAYYKVGRDRLRIPPNFSSWTRDEYGWEHSAVSEGAWTKVNDFVNVQRSHSQIIREIGAASTVLLKNTGALPLTGKEVKVGVLGEDAGSNPWGANGCPDRGCDNGTLAMAWGSGTAEFPYLVTPEQAIQREVISNGGNVFAVTDNGALSQMADVASQSSVSLVFVNADSGEGYISVDGNEGDRKNLTLWKNGEAVIDTVVSHCNNTIVVIHSVGPVLIDRWYDNPNVTAIIWAGLPGQESGNSLVDVLYGRVNPSAKTPFTWGKTRESYGAPLLTEPNNGNGAPQDDFNEGVFIDYRHFDKRNETPIYEFGHGLSYTTFGYSHLRVQALNSSSSAYVPTSGETKPAPTYGEIGSAADYLYPEGLKRITKFIYPWLNSTDLEDSSDDPNYGWEDSEYIPEGARDGSPQPLLKAGGAPGGNPTLYQDLVRVSATITNTGNVAGYEVPQLYVSLGGPNEPRVVLRKFDRIFLAPGEQKVWTTTLNRRDLANWDVEAQDWVITKYPKKVHVGSSSRKLPLRAPLPRVY

SEQ ID NO: 442 - DNA, 19 bp, Artificial Sequence
  Artificial DNA Primer
gttactgttgtccacaggc

SEQ ID NO: 443 - DNA, 21 bp, Artificial Sequence
  Artificial DNA Primer
cttgctgcatggagacaagtg

SEQ ID NO: 444 - DNA, 20 bp, Artificial Sequence
  Artificial DNA Primer
caggaacttgcattctctcc

SEQ ID NO: 445 - DNA, 20 bp, Artificial Sequence
  Artificial DNA Primer
ttttcgctcttgagcttgtc

SEQ ID NO: 446 - DNA, 27 bp, Artificial Sequence
  Artificial DNA Primer
ttttggttgattatccggcttccaacc

SEQ ID NO: 447 - DNA, 17 bp, Artificial Sequence
  Artificial DNA Primer
gcaccagctccaaccag

SEQ ID NO: 448 - DNA, 22 bp, Artificial Sequence
  Artificial DNA Primer
gagatggcctattgatatcaag

1-25. (canceled)

26. A recombinant host cell comprising a nucleic acid construct or expression vector encoding a fusion protein;
wherein the fusion protein comprises a signal peptide linked to the N-terminus of a mature polypeptide;
wherein the signal peptide is foreign to the mature polypeptide; and
wherein the signal peptide has an amino acid sequence with at least 80% sequence identity to the amino acid sequence of any one of SEQ ID NOs: 244-339.

27. The recombinant host cell of claim 26, wherein the signal peptide comprises or consists of the amino acid sequence of any one of SEQ ID NOs: 244-339.

28. The recombinant host cell of claim 26, wherein the signal peptide is directly linked to the N-terminus of a mature polypeptide without an intervening linker sequence.

29. The recombinant host cell of claim 26, wherein the mature polypeptide is a glucoamylase, alpha-amylase, protease or beta-glucosidase.

30. The recombinant host cell of claim 29, wherein the mature polypeptide is an alpha-amylase, and wherein the cell has higher alpha-amylase activity when compared to an otherwise identical cell encoding the alpha-amylase without a signal peptide linked to the N-terminus under the same conditions.

31. The recombinant host cell of claim 29, wherein the alpha-amylase has a mature polypeptide sequence of at least 80% sequence identity to the amino acid sequence of any one of SEQ ID NOs: 76-101, 121-174 and 231.

32. The recombinant host cell of claim 29, wherein the mature polypeptide is a glucoamylase, and wherein cell has higher glucoamylase activity when compared to an otherwise identical cell encoding the glucoamylase without a signal peptide linked to the N-terminus under the same conditions.

33. The recombinant host cell of claim 29, wherein the glucoamylase has a mature polypeptide sequence has a mature polypeptide sequence of at least 80% sequence identity to the amino acid sequence of any one of SEQ ID NOs: 8, 102-113, 229, or 230.

34. The recombinant host cell of claim 29, wherein the mature polypeptide is a protease, and wherein the cell has higher protease activity when compared to using an otherwise identical cell encoding the protease without a signal peptide linked to the N-terminus under the same conditions.

35. The recombinant host cell of claim 29, wherein the protease has a mature polypeptide sequence of at least 80% sequence identity to the amino acid sequence of any one of SEQ ID NOs: 9-73.

36. The recombinant host cell of claim 29, wherein the mature polypeptide is a beta-glucosidase, and wherein the method results in higher beta-glucosidase activity when compared to using an otherwise identical cell encoding the beta-glucosidase without a signal peptide linked to the N-terminus under the same conditions.

37. The recombinant host cell of claim 29, wherein the beta-glucosidase has a mature polypeptide sequence of at least 80% sequence identity to the amino acid sequence of SEQ ID NO: 441.

38. The recombinant host cell of claim 26, wherein cell is a yeast cell.

39. The recombinant host cell of claim 38, wherein the cell is Saccharomyces cerevisiae.

40. A method of producing a fermentation product from a starch-containing or cellulosic-containing material, the method comprising:
(a) saccharifying the starch-containing or cellulosic-containing material; and
(b) fermenting the saccharified material of step (a) with a fermenting organism;
wherein the fermenting organism is the recombinant host cell of claim 26.

41. The method of claim 40, wherein saccharification of step (a) occurs on a starch-containing material, and wherein the starch-containing material is either gelatinized or ungelatinized starch.

42. The method of claim 41, comprising liquefying the starch-containing material by contacting the material with an alpha-amylase prior to saccharification.

43. The method of claim 41, wherein liquefying the starch-containing material and/or saccharifying the starch-containing material is conducted in presence of exogenously added protease.

44. The method of claim 40, wherein fermentation and saccharification are performed simultaneously in a simultaneous saccharification and fermentation (SSF).

45. The method of claim 40, wherein the method results in higher yield of fermentation product when compared to using an otherwise identical cell encoding the mature polypeptide without a signal peptide linked to the N-terminus under the same conditions.

46. A nucleic acid construct or expression vector encoding a fusion protein,
wherein the fusion protein comprises a signal peptide linked to the N-terminus of a mature polypeptide;
wherein the signal peptide is foreign to the mature polypeptide; and
wherein the signal peptide has an amino acid sequence with at least 80% sequence identity to the amino acid sequence of any one of SEQ ID NOs: 244-339.

47. A method of producing the mature polypeptide of claim 26, the method comprising:
(a) cultivating the recombinant host cell of claim 26, under conditions conducive for production of the polypeptide; and
(b) recovering the protein.

48. A composition comprising the recombinant host cell of claim 26 and one or more naturally occurring and/or non-naturally occurring components, such as components are selected from the group consisting of: surfactants, emulsifiers, gums, swelling agents, and antioxidants.

49. A method of producing a derivative of a recombinant host cell of claim 26, the method comprising:
(a) providing:
(i) a first host cell; and
(ii) a second host cell, wherein the second host cell is a recombinant host cell of claim 26;
(b) culturing the first host cell and the second host cell under conditions which permit combining of DNA between the first and second host cells;
(c) screening or selecting for a derive host cell.

50. A method of producing ethanol, the method comprising incubating a recombinant host cell of claim 26 with a substrate comprising a fermentable sugar under conditions which permit fermentation of the fermentable sugar to produce ethanol.
